United States Patent Application Publication US 2026/0137732 A1 - sequence listing, part 4

SEQ ID NO: 3 - DNA, 3047402 bp, Akkermansia muciniphila (residues 1-1,523,701 of 3,047,402)
  source 1..3047402: mol_type = genomic DNA
acgcttcagcgtcagcaccagcgtgtacaggttggggtcctccgcggaccacagtttgggcttggcgtaaatgcccagcagggaagttttgaaatccttcatgccggtgatgcgcaggggcttttccagcacgccgtcatacggggcgtccttgggcttgacgggctccaccagcttgccggaagcgtcatacagggccatggatacggtacacccttccagcttctcggtcgccgggaacaggttgcgcacgtccacgtccacctggaggcgccagtccccgttcatggtgccgggcttggcatgatcaatgttcagggcccagtcccgctggtccaccgggttggtctgcgcgaaaaagtcgcggatgtggaccttgggcaccgcaaaaatggagacgttgcggaaaatgccggacaggcggaacatgtcctggcattccaggtacgcgccgtcggaatggcggtacacctccgcggccaccacgttctcccccttcttgaggtaggggctgatgtcaaagcgggccggattgcgggaatccttggaaaagcccacgtactgcccgttgatccagaggtagaagaaggaatccacgccgtcaaactgcatgtacacctccctgccgtcccagtccgcgggcacttcaaacgtgcggcggtaggagcctacgggattccgttccttgtaggacgtgtaattcttgttggagggctccttcatcacatagggccaggagcgttcaaaggggtacggctggttggaataaatgggggtgccgtagccctgcgtctgccaggaggcgggcaccttgatttccttccagtccttcacgtcgtaatccggcttgtaaaaatcggccgggcggctctggggatccttggcccagtggaacttccactggccgttcagggacttgcgccacttgctgttttcaggcagcactttcagggcggactgcaaatcgctgaaagacgcaaaaaaggccgtgggggcctccttgttcaaatgcaggttctgttcctgttcccattccagccctgtgggggcgggcgcgggggaggaatcgcccggggctcccaggccgcacatggcggagcctaccgccagcgcggtacaggataaaagccaggatctggtcgttctcatgaagtaagtatgtgtcaacgttggtatgcaaaaacggattgtcctgttacatacgaatccgcaattctaattctaacagcaaacttcacctttgcaagctgccgttgcgtttatgaaccgcctgcgaagaacgcagccgttaaaaagtatgctttaactggagaacgcccacgcactgcatggattcctgctgcgtgtactccttggtgatgtagtgcaggccgaacagcagttccgtgcgcttgtaccggaggccgaagccgtaaccccattcccccaccacgggatacttgttcacgtactccggagaagagcggaacaccgtgccgtccaggtacaggtcatgggccacggcgcgcacggcggcgtgaagatagccgtaatacccccagttggcgacgttcgtcctgttgtaaacgaagggcggcgcggcgctggtggccccgcggatgctgttttccggagacgtattgcccagattgtagccgaagcggaaggacatgccgccgcccgcctgcaccttcaccgtgccggcgtccgcatgccagtaggccagggcgtccgtttcaaagccggaactgtagcgcttttccagtccgcgcaggcggtagtaacgcttgaaaaacagattggccgtcatctctccagggagctggttggaccagccgggccattgttccatgccccacagcttatgaataaaatgctgggagcctttcgccagggaattcgtgcccgtggtgcccagctgcaattccagggaattggccctgtcttcattcttcaccagggaggtgaggcccagcgtcaggttgcccacgtagggatgctggttataaatggggtaggtagccttctgctccggggtgtacatgagctgggtcaggtccagcccccactgctggcgcagattgggggaaccgttcatgcccatgaaacgccgccaggaagcggaagcgttcgtgtcccccagcaccgttcccagcatgccggaaaaggtgtggctccgggatgtggtgccggacatccaggcaaagcggacgccgttggtataattatcgtcatcccccacgaacatgtcgttttccagatggaaactgatgacagggccctcctgcggcgcttctatctgctgggttcctgcctgaagggaagccaccgacaacaggccggcgcacatgcacaaagccgtacaattcatgcgcggcagtttgtgcgtttcacttccgcgtggcaaggaaaaatcaggcatgccctgcgtttgcgcttttcaaaaccgggaaatatccacagacttcccctgccctgccagggtttttacgccatgattattgacacgcactgccatctggcttccacgcaatttgaccagtcccgccgggaagcctatgtggagcatgccctccgggaaggcatcgaccgcatgattacgctgggagcccgcccggatgactgggaggcgaacacggcgtgggcgcgccaattcccgggcgtggtcttttgcgcgctgggcatccatccggacgacgcccatgaagcgccggagggctgggcggaccgccttttccggatggcgcaggacgttcccctggccgccatcggggaaacggggctggactacttccacggagccccccgcggctgggagcctgacagcttccgacgccttcagcagaacctgctggaacagcactttgacctggcggcgcgcctgaacctcaacatcgtcctgcacacgcgggaccggaaagggtccggaagctttgaagacgccttggcgattgcccggaatcacgcgggccgcgtgcgccccgtgttccactgcttcatcggagacacggcccaggccgctcgaatttttgacgaactggacggcatggtctccttcaccggggtggccacctttaaaaacgcccccgtggtggcggaaaccgcgcgctggtgcccggaagaccgcatcatgctggaaacggactccccctacctcagcccggaacccctccggggccgtatgaacgaacccgcccacctcatccatacggcccgtttcatcgccgcttccagaggcatggaactggatgagctggcccgcgtaacgacgcaaaatgcggaaaccttttataatctggacaagggctgaaaaaaaatcccggcaatccgcgctagcgccttgaaaccgaaatcataaattagtatgaacagggcacacatgaaagcgccattcatttttacctgcgcctgcgctgccgcgctggtgctccccttctcttcctgctccacccagaattcctccacggccggctatgacactgcggaaccggccagcggcgaaatcccgccgtggattgcggaaagctctgatcccgcttatgaatccggccattacagcccggtgaagagctcctccagctcttccagttacgcttataatccgcccgccaagccttccgtcagcaagaaatcccccacgcggaaaaccacggccagcagcaaatcctcccgcagcacgagcgccagaaagagcaccacgcgcaagcccgctcccaaggcacgcacctacaccgtgaaaaagggcgatacgctgggagccatcgcccgcaggaacggcacctccgtcaaggcgctgaagagagccaacggcctcaagtccgacatgattcacatcaaccagaagctcacgattccgcgttccaagtaatccggggggcccttcccggtttcaccgcttatgaagcatctctttcttctggccgtcctccccgtggttctcatggggtggacgtcctgcacccactccggcaagggccatacggccctgccggatccgcgcgctgtggacaaatccgtcccggagtataaaaacccgttccatccctccacgtatgcccactttgtagcccgcaaggactaccggaaaacgtatgacgtctacaaggatgataccctgctgaaccgcaagccgaagaaatcccgtaaaatcttcgtctgcctggacgagcagcggggccagtacctggtggacggcctgatcgccatggactttcccctctcctccggcgtcaaggcctacccgaccaaaacgggagactacaccgtcatctccaaaaaggaggaccacgcctccaacctttacggcaagatgtatgatgccgaaggcaaatgcatcaactacaatgcggaagccacggaccccgttccggaaggcggccgctttgacggttcccccatgccctactggcagcggcttaccaacgcgggcctgggcctgcacgtgggtaaggtgcggcgccaccccatctcccatggctgcgtgcgcctgccgcggaacgttgcggaaattctctacaagcaaaccagcgtaggaacgcccgtcaccatccagagaacgcccctgcccgtgccggaagctcagaaagcccctgctgtacagtaacaaacagacagaatcctgctacagcaaaaacgacttttaccggacagtctttttcaaatatatttctaaaaaattctcttcctttagcggatccctgttaattcacctgccgtctgcatgattgtaataacagtagttgtaatagacccagagccaatttgccatcgttcatctcgctggaccattgcaccggctggacgaggtttcctgtgctgccaactatcccataaggggagtagtcgtaagttgccgcgatcgttccctgcccatcaaaaacttccgtcacattcttgttgaagtccgttccatagcagtaaagagaggcggcctgcaccagggccaggggacgcgtagccaccggttccaggggatcccacaacagtgtccgaagcacgttccagttgtccagcatgtccaacgccgctagttgcaggtagccacggtacaggtagagttcatggctggcgaccgtcccgttgacggtgactttcttcatgtagcggcgtcccatggagttgtacccgcattccactactatgcgtcgtcctcgctggtgaagcttaccgcatggttggttgcgttgtacatagctgtccacacgcccgttgcggtcttgatcaatgttttttggttgcctgaagcgtcatattgcagcacaaagggcgtttcccactttcttccatgcgggtgtactggttgagttcgttgactgcgtaagtgagttcttccgctatctcccgcgccgccttgcgattgccgatgttgacgtgactgttcccaaggcggctctagtgagttcacttctggcatcataagtgaagctgtcggcgcggacgtttctgttccacgtagttaataactacattcctcgatggcagtagtttcttctttcggcttcttaatttaatggaaaggatattctgtttatccacacaacaccccttaatttggatggcgagtgtaatagaactattcctctatttcatcattatataatttaaatagataaaattcaatatatcctaccattaatccaaccgctcctgacaatataaaaaaataatgatgttcatcgcataagatacggtccagcatagcgcccataatgagtccgataatcagtcctaaaaaacaagctaccagttgatttatttcactagggaaaatacgccagattacccagccaattacagccaatataaatgttactggaaatgaaaatacaatcattgaaaatccagccatgacggcatggtgaaaattagataaacacatggaatatccggcgccaataagccaaggagcaaccccgcaaattaatatgatatgaattatgttgtatattagttgcattgagaatcattaagtaacatattccaaccaatatcagaacctccttccggaagtcccaaaaaaggaataaagcctcggctggcataacaagtcacatgggcttttagcctacagttgtttctttctgaacaacacgagacgtcttgacactgcttttcagcatttcatccggcgtagctataagaagcaccttccaatattaaattagccattaaatctaattgatagttatttcatattcttccataaggaattaacggaatatccatgaaattataactccacaaattggaaataaataaaagatgatgaataaaatttttgatttttcatatatgacgaaaatattaaagaaagatatcatccatattagaatcccgagtgacactgttagcaacgtatcataattacatcctatttttctcggaagaaaataatacatcaccgaacaatcaatatcatgaaaataatatagtttacaatagaattgcccatttttcctttcttatcttgagaaaggatatcaaatgttacaattttttttactgctttttttgcgtttcgtttatgttctatttcttccataccatatagctctaggaaaatgttccgattcaattctcttcctgtgttctttgtaatacgctagcttcttataaaacaagtctgaaaacattttttcatgattatttcaattggaagcagatttatttttgattttcttcaaaacatctattattctgaaacactcaatgactataataagataagaaaaaattaatgctgtatatgatattaaaagttcattcgaaaagttttcccataatagatttataccatgatacattgttgacaaaactccacttattccagagatcagaaataaataaattgtaagtttgataattgaaaaagggaagttattaaatgaaaaattaagagtattttttttgatccaaacaaggattcttaaaaataggattacaaaaatacatccacaaactaattcgaaatattcatatccagttaaaggagattcagggtaaatcataataaagatgactaattatatcgtgttcattatttagaccatatttttttattttcattaaaagatttgttagcgatttcttcagtttgatctataacaaatggaattttcaaagtagcggcaatcttaacataccccgttgcatctaaagttaaagatattggttttgcattcaaagttaacccagcacttatcttaaaatcaatagaataagatgcttgtatataagatgataatgtaatacccgcatcaattctatgagacaatcctaataattcttcccgataggatgttgaagttttaccattacaattgtcaattttaagtattttttcattacttaatccagcaaccatagttcgtaaagaatattcaatatcaggcagaataggcaaccatttttgtttaattttaagtcttatgctacacctataccaacatctgttcgtaattttgcttcaatgcatacacaatttttctttttttctattgatatacttccctcaataataagaagaatgggtatgtaacccgcagggatagtcattgccgagataatcaatagagaataccacttcattatcaacaaacccatacaaattccatcccccttcttcagcgataggatctctgttaatccacctgccgtctgcaggattataataacgatagttgtaatagaccagagccaatttgccatcgttcatctcgctggaccattggacgggctgggctaggttgcctgtgctgccaactatcccatagggcgagtagtcgtaagttgccgcaacagctccctctctatcaaaaacttccgtcacattcttgttgaagtcccatccatagcagtaaagagaggcggcctccaccagggccaggggacgcgtggccaccggttccagtggatcccacaacagtgtccgaagcacgttccggttgtccagcatgtccaacgccgctagttgcaggtagccgcggtacaggtagcgttcatagctgacgaccgttccgttcaccgtcaccttcttcatgtagcggcgtccctagtagtcgtagtcgcattccaccaccgtactgccgtcccggctggtgaagctcatcgacctattaatatattacacatgatcattgaacttatacaattatccaagaattgtaaataaaatcatacttttacttactcaaaataggcagattaataaataaaggaatatggaggcattttatttcaatccatttataaggcgtaataattaactttaattgttcactttcttttgtagtaaatacatgatatgaagatacttgtgttccgcctaatccaaaacttatcaaacgttcttgttttgatttgagttgcacgccatctaatgttttaaattcaaatttagaaattccgattaaatctttaaaagaaaaaaaaattttataaccgtcctttaactcttttactgatgttatttttactaaagtttcatctaaattaaattcttcattcttttttatttttattattttttcttttaatggaactgtcttttgcgatgttaatacagtcaaagtcccatttaatactttttccaatcctgttttaaaaaataactttacttgagctatactgccatcttcagaaaatagaaaagaaaatgaaccaatagcattacatggaactggctcttgatgatcataaagtattattttttttccaagactaaacattttccgatttttttctgaatctgtaatatctattgtaatttctaatgtatcttgataaaattttaggccactatatttcacttggacttcaggaacactttttgtttcttggatatttcctaaagaataatttatacatacaacactaattaataaatataatatataattcatgatttcatctattttatgctaattatttttcaaaagaaaatgaatcacgtttcgggaaccatgcttcccctttcatggtgataggataaccagagacaggaatctcagcttcctcacattcacatgctaatgtcaattttattttaatttgtttcgaaaatatctcatctttaggtccaaaaattccaagagctgttacacctccaccaattatattcagagcaatagtaattgcttttccccctggtcccgcaaagaaacttgctacagtgataactactcctgcaaccttgagaggagcattcaaaatagactcttttaatcccactgctgtgagtactataatataatccactttatgatcattatcatgatatttttcttgggaatctaaataatatttagaatgtttagaaaaaatccccgtgaaaccaattctaaaactttctcgatccatagttggttttccattatcactacattgcgccttgtatgatcccacaaaagtatcagcaatgctttcttcaaaaataatattaccacctatattgaattctcctttacttccaaatattaaacccaatgaatcaatatttttttcagaattattcccaacaaacccatacaaattccatcctccttctgcagcgattggatcgcgattgatccacctgccgtctgcaggattgtaataacggtagttgtaatagaccagggcgagttcttcgtcgttcatctcgctggaccattggacgggctggacgagactgcccgtgccggtcacggtcccatagggcgagtagtcgtaagttgccgcgagcgttccccgtgcgtcgaagacttccgtcacattcttgttaaagtcaactccatagcagtaaagggcattttcccgcgccagggccaggggacgcgttgccaccggttccagtggatcccacagcagtgtctgaagcacgttccggttgtccagcatgtccaacgccgctagttgcaggtagccacggtacaggtagcgttcatggctggcgaccgttccgttgacggtgaccttcttcatgtagcggcgtccctggtagtcgtagccgcattccaccaccgtactgccgtcctggctggtgaagctcaccgcgcggttggccgcgttgtagactactgtccaaatgcccgtcgaggttttgatgagggtctggttgcccgaggcgtcgtatgtcggcacaaaaggcgcctccgctttttcttcgatgcttgtgtactggttaagctcgttggccgcgtaggtgagttcctcggccagttcccgcgccgtcttgcggttgccgatgttgtcgtagctgtaaccgtaggggtctgttcccagagtagccccggtgagttcgtttctgccgttgtagctgaagctgtcagtacgagttgcttcggttccccgctgctgggtgcgggtgaccgggcgtcccaatgcgtcgtagctctggctgcgggtgaccagcgcggtttcccccagacggcagcttatggccactgccaggtcgcggtgttcttcataggcaagttcccggacgatgccgttgggcatcgcgaggctggagggcaggctgcttcccgccaggtagccgtaggcgaaggtttgctcttctcctccgtgcacgattccggcgccggcaagcctcccgttggcttcatagccctggcttgcttcctggaggacgtcggttccctgtttcagggtatagccggaggaccggccgtaggcatcgtagttttcctggatctggcaggaggcgcctcctatggtgatgctatcggtgtccggttcgttgtagggggtgtaagtgatggtgcgagagcctgaggcgtccgtgacccgggtcagctggttgaggcagttgtaggcgtactggatgccgggcgtggagtcgctgtaggagacggaggtgttgacccctttcttcagattgtagccccaggtggtgaccaccccctgcgcgtccgtgagcgtggatctgaggttcagggcattgtaggcggtgtcctcatgcgttccgtccgcgtaggttttgcgggtgacgaggcctgtggcttcatcatagctccaggtggtgacgtctccgtccgtgcgtcccgtggggtcggtggtgatgtcgcccgcgtcctcccggaaggtggtaaggctgaccattctgtcggcttcgtcgtagccgaagagcaggggctggatggccgtaccccattcggcggtctttcggccccggaggtcgtagccgtagcaggccgtgttcccgagggcgttggtgacggcggaaggctggtcaaaccagggatcgtaggcggtagaagccgtgttgcccgccgcgtcagtaacggaaacagtgcgcccggcgatgtcggtacgtgtcgtaatggtgttgccccgtccgtccgtgttagtgtagatgatgccggtttccgcataggcgcgggtctgcgtggaagtaatacccgcgtagtccgtttgcgtagtaacgaagccgtcgatgacggtagcggtggccgtgatgtcggaggttggtacggtgcttttttgcgtccgcagggcgcctgttccgtattcgctccattgcgtggatatatttcctctgggatcaatggagatcgttttgctttccagcgtggacgagagggaggaaaccagcgtcttctgcgtttcgccataggtagtcccctggccgttgttcctggtcgccgtgacgacgcggtagacgccgtcctgcgcctgttccacgccgtagctccacgtggtgatgcgcgagttggacacggtggccggatcggcaagcttccaggtttccttgaccttattgccgaagtcgtcgtattcccacagggtcggcgccatcgtcgtagctgcggtttccgcatctgtctgttccttggtcagctgtcccttggcgttataggtgttcctcgtgtaaatgactcccccgatggtgttgggccggcccgtgcgcagaatttccccggcaccgttgacgacgctgcgctgcagttcggtttccgtttccccggagacggctttcgtgaaggtccgaacgccgtcggcaaccaagtcgagggaatagatgatatgccgctgtcccgtgccggattcttccaggaccgttccgtccggcgcgttgcgcgtgacgaacgtggctcccgaggggatggtctgcgtcgtcgtcaagccatcctggctgtaggcgtaggcggtgacccggcccaggacgtccgtagaggaagttatcctccccagcaagtcgtactccgagctttcgctggtcatcatggcccccgtatcccggcgcgtagagaggatgcgccccgccgcatccagggtgtaggtggtgatggtttccggcgtgatgaccttctctccgtccatcaccgccgagcgggtcgtttctaccagttggcgcgccgtgtcgtaggcatagtccattcttacaccattttcatcaatgtcccacaacaggcgcccgtcgcacatcagctcgcgctccgttattcggccattgcccgccgtccgcttcacccacctgttctgcgtgtcaaattcataggaggcgctgtccgtgagcgtccattccccgccggtgagcagggcgtagctttcttccctgacgcgctgcccttccgccgtgatccaggtcgtggtgcgcgtgctctgtcccggcacggtttccccgttgacgcgcgtttccaccgtttccgtgtagagggcgccgtgctccgtcgtggccgcgtagtcgtgccaggtttgcacgccggtgaggtcccgggtcatccgggtgcgtccgcgggcatagacgtcgggcgcgccggccagccattgttccgtggccgtcaggcgcgagcccgttactcccagtccggtgaccctcttttccgtccttttgacgtggttggctgtcgtgtacttgtaggccgtggtggtcagcgtcttgatgtgcccttccagcggaagcaggtctaccgtttccgtggcgggttcgtcgttgaagtcggcttctcccgaatgcgcataggtgtagcgcgtgatgcgcctgccgctttccgcccacggttcgtcgcgggagagcaggcgtccgtagaggtcatacgcgtaatgaatttggctgccgtccggggccgtttccgtcttgagccgtccgcactggtcgtaggcgtattgcgtggtctgggcttccgggctttgatagccttccacttgagtgagcagcagatcgcctacgtccgtcgtttgatagatggagcaggtgcgctctgccacgatacctcctttggagatttccgtcaccagctgccagaccgagtcttccggttccagctccgtgcgcgtgcggatggtcgtgacggcgtcttcccccgttcccctccgcatgttccacgccaggccgtttttccaccaggtgacggtatggggctgcctgcccggcgtctgctccgtgacggtgaagtggccgtccgcagacagggagaggacaaacgttttgaagggagcacccgtaacggtataaaatccctgttcgtccgttccggtgatttggccgggggtatagagagcgatggtgtaacccgtggaggtgacgttttccacgttgagcaggccgtcccacaggttccagatttgcctcagcgagccgtcttcggcatgcttgacgtccaggtaggatgacgcgttggagatgacctgcttgtcggtggtggtgtaggagaggagcattcctgtttccgccgagaagaggtattggctgccgtcttccacgatccagcggaggcaggattgtccttccaccgtgtccagcgttgcccgtcctccgcccgacgtgtccacgccaacgggcagcacggacccgttcatatagcagcgcatggcaatcacccggtctccctgcaccagatcaaaacgcactccgggtacaattcccccttcgggcacgtccaggcggctgttcaacggatggttgtaggccagtgaggaggggctttccaggccggagacactttcctcagccctcagttccacaaggcccgcaggaatccctcctagtccccggaacattccgaagttgcaggaccagtacatcagggtggccgtgctttccgcactcacactgcaccctgcggaggagtagtttcccagcgtgctattccccaccgcggagcccgaccgggccagcgacggggaaggcggcgttccgccgctgttatcacacgtgtctccctcgcacgggcacttctcgggctcctccttgcctcccggctccgtcggcaccacgtcgatgctgtagttgcagatggagacgttgtctttttcaggcttgtagtcgatgttggtctggttgacttcccaaatgtaggagccggagggcagctgcgccccgccggtccccgtgtggtatttatggccgccctgcttgcctgccgtctgcgagtctttcttcaggtccacctgcgccaccacgctgccgctggagtccttcacttccaggctgccccagtcgtccacccccaggaagagcgaacaggtgccgtagagctttttaccgtccgctccttccggaatggtaaagtaaccgtgagcactgtgtccatccgccgacgtactgggcggtcccacggtaatttcatcgtgttcgtggatttcctcgaacggtagcggatcgggctccggagaggcgcgcatgccacgcggcatgggtttggccgtagagccaaagtaccatttgcggtaagcggggatggaagaaggggtgccggcagaagaagtagttggagtattcataaggcattaaagaactgggattgatgatgaaattagaggagagcaatcctccatgatcattttcccagtagcatgatccagagccagtgtcaataaagtttatttgcaaattttttgtttgcctatgaaacataacgattttttccatcaaaaaataatataataattattacgctcagtaccttccttttacagacatcaatattatctatttgttagaaaaaatccacaataggatgtcattcctgcttggcgccagtcaaattcctgtaaaaaatgtctctctcatggagaaagaatggttgatgattcagtagtttgtcttttcgaatttgccgcaacttctgaaaacccttaaacaaaaaatacatcttttccgaagtttttctatgaaaacgggaggagaaagattgccctccatccgtagaacccttacaatttttgccatgcctgtatctccggcgcgcattctagaagatttgtcccccttctaccggcaggaagaatttcccgtgcttctgcaccagtgtgaaacgtgggcggaaagccgtccgttggagggatgccgggtgattgacgcctcccccgtattccggaatacctgcgccaaatacgccgccctgctggcggcgggagcggagttgacggcagcagtctctccggtgatgccccacgatccggaaacggtcgcgctgctgggcaggtatggaatacccgtggtggaggcggaacgggcggacggaccctatgatgtggtgatggactgcgccggggcgctcagccatgttcccagccgctgcgggtatgtggaactgacccggtccggagcgcagcattatacgcgctgcacgcagcccgtgtggatggtggacgccggaaaaatcaagcagatagaaacctgcctgggaaccggggaaagctttttccgcgcgctggaagcgctgggaattgagagtggcccgggacggaccctggtagtcatcgggtacggaaaagtgggccgcggaatcgttctgcacgcgctcaggcggggcttgaacgttatcgtggcggatgtggaggaaaaacctctccctctgtcctccgcctcattcgtgcgcgcaacggatggagaagctcttaccaatgcagtcagtcatgccttttgcgccgtcacggccacagggcggcggcatgccctgtcaggagtgattgaccccgctgtgacccgctcctccggcgttctgctggccaatatgggcgtggaggacgaatgggggccggagatcccgaagaaccgcctgctgaacggaggccgcccccttaatttcattctgccggaccctacgcaaatgtgctacatagaccctcccctggcgctccataacctgggcgccgtggagcttgccgcaggccgcgccatgccgggcatttttccgccgcctccggaaatggaggaagctttcctttccctgatccgctcccgcggttccctgccgccggacatgctggactggatttcctgacttatcatcttgtctttgcaggaatgaaggagtatcgtacagagtacggctgggggcttcgcgttccctggccggcctgacgtttcattgacttcgcaattcatgaacacttattattcctaccgcagctaccggctgggagggagactcctcggcaccctggggtgcggcctggcctgggcattcttcgggtccggatggtggagctttctcctcggcgctcttctcttgttcctgtggcttcccgtcattctggggagaccttattttctcacaatcacttcctcctccatctcctggggcaacagcatttcacgcaaggaaattccatgggaactgattgagcgcataggatgtacgcccgatcatgaatctgaacccggactgatgattgaactgaaagacggccgtattctggatgtggaatcctcctgcttcggttccctgcctcccgtacgggaagccattctgcaagcctccggttcctatcctttccatcttgctccggatttgttcgccgatccggggttgttgagcgaatgacgcggcggagcttccttagacccgctgcggcactccgtgccttcccttgcgcctgaaccgcacgttcccggcgccggaaggtgtttatacgcgttttttccggtgccatgccggcacgcctgtttttttatccctcccccggaaaccaccgtccggtttattgacgacggtggaaaatgaaaaatgttccacgtagaacattcatgtgaataatccagtcatcactttcattttcaatcaataaaaaacaggcgccgtgacagcacggcgcctgttctcgtatgaatgattttgtaccatcaaaatcagttgggagatctcattggcatgagcacgtacaggaactcatcacctatcttcaatacgcccgggctcatttcatcaatgaggtttaacgtgatgatcgtatccccggccatcgtcttcaggggagccatgaagaaatccgggttgaaggaaatggaaagcggccttccggcataagtgatcgtcatggattcatgggcttcacccacgccttccgcgctggaagccacttcgagttcgttttcacggaagttcagcttgatgttcgtgcttttgtccacggaaaggagggacacgcggcgcaccgtttccagcagttccccgcagggcagttcaatgctttccttgcagtccgtcgggattacctggcgatagttcgggtaattgccgtcaatcagcttgctgatcagcagcgtgtcattgatttcaaaagcggcctggttgcgggtgaaccgtacggtgacggtccctacttcatccagaaggcggcggagttcaccaacggccttggtgggcagaatggcgtccagttgctgttcttccgggaatcccagggcggtttccgccagggccaggcggcggccgtccgtagccaccagagtcatcttgccgttgcggaaggaaagggaaatgccgttcagcacgtagcgggtcgtatccgtagagatggcgtattccgtgcggcggatgcagtcgcgcagcaaattctggtccacctggtacacggtcgcctgttcaaaggacggcagttcagggaattcgtccgccggaaggccattcagcttgaactgggagcggccgcattccacagtcgcctggttgcgctggttgacgtccacctggacttctgcttcaggaagctcgctgatgatgctcaccagctttttggcgggaagagtcacggtgccctcgcgcaacacgttcgcgggaactacgccggtgatgcatacgtcaagatccgtagccgtaaaacgtacctggccgttttcagcttcaatcttgacgttggaaagaatgggcagcgtcgtcttggaagacaccacgctggcaacctgtctcagaccgtcgagaaatacttgcttggaaatggtaaacttcatgtgtctgtgcttttatctgcctcgcatcctctcacaagtgcctcctgtgattcaagccatttctccgtcaaaccctaatatttggcagtatttttttaaaagcataccatatgtagtaatatgctatttctccgggcatatcttgcatgaaacggtttttcaaattatttaagtattcttaaaagtccgttctccggcgaacaattcccggttgacgcgcacgcggatttcgaatccggggtcaaattatttttttaagaacaagccggttaacaaaaagaaagatcacggaaaaataaaagcatgaaaggaaacataaacagcgtttcttccggatcgtgtatatgttcaatgaatttgccgctttccagaggaaaaagaacggcatccggattcgaaatccgctacttttcagccaagcttcggcgattttaaacaacaaagactttcagaatttctgtgaaacgttcattcattattttgtctttactggttgcgggaggcatggcccatgcggcttctcccatttattcctgggagtggaccactgaaggaacgcaaataactgctcccggctggaacggttcattcaattatacaaccggcaacgattatgccactttcggcagcggctccggcggaggcacgccctacaactctggcatagcgggaatttcaggcagtttcaccgtcagcttcgacctgaaaaacctgagttccaccaacaacgcctggaaagacgttttcagcctgtattccaatggaacggtttccggagaatccaacagcatggtactggaattcaatgcctccggggaactttatttttacaacaagggatttggaggccaatccggcggaaacatcaatacaggcctgacctggacggacctccagcaggacaactggaacaatctgagcatcgtttccgatctttcctcccagactctctccgtgtacgtcaacggtgccctggcaggtacgatcaccggctggaatccgtcctcccctgccctgacaggctcccaatttggatcttcctttggaaacacccgtcccatgaacggaaccatagatgtcaacaacatcaaattttacgacggcgttgtgcttcctgttccggaagcggccactgcttccctggggctgctgggcctggccgccctgctgatgcgccgccgccggagctgctaagcatttgccgttatccagcaagaggccgcatgccgggaagggttcccccgcatgcggccttttccgtattccggcacttccgtcccggaattcatgttcccgtgaatgtttcccccggcatggtccaggcgccgggcggaaccaccctgcccggcaaaacaacggtattggcgcccaggcgcacatgatccccaatgacggctcccagcttgttccttccggtaatttccagccttccggccgccatcatcctgtgctccccgccgtcatggcggaaattggaacacaccgttccagccccgaaattgacgtcgctgccaatgatggaatcacccgcatagctcagatggggaataaacgtcccgtctccgatgatgcagttcttcagttccaccccctgccccgctacacagccgtttcccatggacacatatcccctcaaatggcagttgggcccaaggcggcagccgtcccccacccatgcggagccctcaaccaccacgccgggcatcaccacggtgccctttcccacacggagactgcccaggacgtaaacgcccggccgcccggaaaaatcgtctccctccattccctccatcactctcttctgccagtccagcaggtcccagggatagacgaggcgctccacagccgcctcccgcccggaaaaaacacgtgacagtccgttccccggccctttccgggccagcagccgcccttcttcattccgtacttcccctgtcccgcaggaagcaagccatgcggcagcttccggggaaaaatcatgcatggacacctctaccacttccgccgcactttccgtaacggcggcttctggattaaaaaccgcctcaaagcccgcttcccggagccgggaggcacaataggcggctatgctcaccccggccacggaaaagctgcggaaaggcctctcagggctcgttgcgggaaaggtatggtccctttccggaatgtaaatcaatctggcaaccctcatggaggaatggtatgctttcttacggcgcttccgcaagacggaacgtgcggctctgtttcacggttccacctgccaataaccctgtgaaaggataagtcaattaactgtgagtatggtgtgaataagttattcagatgttatccacatttttatgaaccgaatttattcacactggcagatggtttcaatccattcattcccaggagttaaaaacgttgttcacactgggcacagggtagaagaagaaggaatttaatattgttaaatctaatattcttcaatcacacaacgtgattgtcctttctcgcgcattcgtgctacaaggtcggcatgaacacggaggatcaggatacgcgctggatgaacatggccgtaaaactggccgaaaaaggggtcgggctgacaagtcctaatccctgcgtgggagcggtcatcgtgcatgaagaccaggtgatcggctccggttttcatgaaaaagccggcctgccccatgcggaaaggaaggctattgccgatggaacggccagaggcaacgccgccctgtttgcggattccactctgtacgttactctggagccgtgcagcaccaccggaaaaacgccaccctgtacggaagccattctggaacaccatttcaaacgggtggtttatggctctcaagaccccaaccccagacaccgcggcgccgcggctgacattcttgggagagcaggcatccaggtcacccgcgggattctggaaaaggaatgcgatcatttaatccggggattcaggctgaacatgctggaggggcgcccatgggtgatcgcaaagagcgccatgtccctggacggccgcatttcacgcagtccggaacggtcccagtggctgacgaatgaaaaatccaggtctttcgtacataccctgcgggctgagtgcgatgcgattcttaccggaggaaataccatgcgcctggacaatccgtccctgaccatcagaaaaccggaccgtcccgtttcttcccttaaggaacagccctggcgcattatcctgactcacaacgccgcatccattcctgcggattccgtttgcctgacggatgaattccgtgaccggaccctgattatagagaacgtttcaagttatttggaattattaaaaaatctgtataatgaaagaaaaacagggactgtcctgctggaagcgggaggctgcctggtccgggaattcctgaaagccggcctggtggatgaatgggtgggattttacgcgcccatcataacgggcggcggcgcagacggcgtgacgggcggttcattcctggaacgtgaagcctttcttgagcagccggttgtgagcatctttggaagcgatgtgtgcatccggggcgacgtaagctaccggtaacgggcacagccaattattcattcgccttccggatgtttttaaaccgggaaagcatctttaattaccgatgagcctgccattcggcggtttttctcatcattgtgcatcctctctgttcgtgtcccttttttaagacaagccggatggcatgaaccgagccggaagcgtatcggtcatacaggggaaaatattcaggaaaaagacctccccccctcgtttataaaccggagcctgcagggagtggaaaacgggtcatagggagagcatgaggcttttaccgtgcatgcaagttttcagcattcaggagccgggccgtattcaaatttaaagccccggcatgaaaacggcgcaggctttcatgcctgctgcctgccgcgcttttgcaaatgaacaagcagcagggcaatgtccgccggagtaatgcccggaatgcgggaagcctgcccgatagtggcaggacgtatgctgcccagcttgatgaccgcttcttttttcagggcgtgaacgcgttcgtaatcaatgtcggcaggaatgattttactttccatccgggtgattttttccgcctgttttttctgtctttcaatgtggccttcgtactggatatccgtggcaatggcatccaaatgttccacgtggaacatttttttcagttcttcaggcagcagggtccagtcattgcctggcctcttgagccaggtggaaagggaaacgccttcatgtttaagcaaagctgcttttgctattccttcctcaatggcgttttgcctgtcttccgttttcctgaacgtttcgcgggtgatgaggcccgtttcaaaagccaggggggccaggcgcaggtccgcgttgtcctggcgcagcagcagccggaattccgcccggctggtgaacatgcggtacggttcgtccgttcccttggtgacaaggtcgtctatcatgacgccgatgtaggcctggtcgcggcgcagcaccagggagggcttgcccagagttttcagagcggcgtttgttcccgccatcagaccttgcgcggcggcttcttcataaccggaggtgccgttgatttgtcctgcaaagtacaggttttccaccagcttggtttccagagtagggtgcagctgcgtgggagggcagaaatcatattccaccgcatatcccggacgaatcagttgggcgttttccaggccgggaatggtgtggatgaaatcgcattgcgcggagtagggcagggaggtggaaacgccattgaggtagaattcctccgtactgcggccttccggctccaggaagacctggtggctggttttttccgcaaagcgcacgattttgtcttcaatggaaggacagtaccgggggcctatgccctcaatgatgccgctatagagagggctgaattttaaattgtcccggatgatgtcgtgggtggtctgattggtgtaggtaatccagcacggcatttgcttcatgcggaagtcttcgtctccccatgtgttcagggtgcagaaaggttcggaagcgcgtttcagtacgtcgcgggaacggtaactgaacagagcctccggcgcgtctccgggctgcatttcacaaatggaaaagtcaatggatcttccattgacgcgcggggaagtgcccgttttaagccgttccacttgaaagccaagcgcggcgaggtcggtggaaaggctggaaggagcgcagcccatgcggcctcccgttatgtgctgaaggcccacgtgcagcagcccctgcatgaatgttccggagcagatgaccacgctgcgcgcgcagatggtgtagtccagggaagtgacggctcccgtcacctgctgctccccgttgacgagcagtttgaccacgtcaccctggaacaggcgtatgcccggggcggtttccagaaccattttcattcgtgcgcggtaggccgttttgtcgcattgggcgcggggtgcgcgcacgctgggccccttggaggcgttcagcatccggaactggatggcggtggcgtccgtattcagtcccatggcccctcccagggcgtctatttcccggacaatgtggcctttggcaagccccccgatggccgggttgcaggacatttgcccgatggtatccaggttgtgggtcagaacggcgacggagcaccccaggcgggaggcggccaacgccgcttcaatgcctgcgtgcccggcgccgacgacgaggacgtcgaacagggaggaggcgggggaaggagaggaattcatcaggatgcggagcaaatggcaagacggtgcagaatcagccgcggatcaagcgaagaagataccagggccttgtccgccttcatgcattcctttaaagtctgcttcaaccgttccgtcttgaatttggaagcgttctgcgccgccaggaaaagcgggtacgcattgggagtgccgtcttttttcaggggaatcagcgcggcggcataggagggcagggaggagatgcgggccgtaaattccttgaagttggtgggcttcagattgaacgcgtcacataaaagcctggcggccagcagatttctcagcgtggggatgaacgctgcgcgcatgatcgtgacggcgttttcaccgcgttccagttgaaagtcaatcagggagatggccgcatcgctcttcttgttttccagagcacgtgaaatttcaaaaataacgcccgtgcgcgtcagcggaaccatgcgctccacatcctccggcatcacggtgcgcctgtccgcgcccagataaagatccagtttttcaatttcggaaataatctggcgggaggattcgctgacgcggtgaatgaataactccagagcggcggaatcgaagttcatgccccgcgcgcctgcctccttgttgataaggggcatcaggctgccttcccagccggccttggtgatgtccggcttgttcagttcctccgcggcggaggattggagcaggaatttgttaaaggaacggcgcttgtcaaattcggtggcggagatgagcagcaggacgtccggtcccagtcccccttccagcagatgcctgagagagtccagagccgcttccgtggtggaggaacgccccgtgacggaatcccccagaaaattgcagttcttcatccagaccaccttgcggcccggaaaaaacggcagcgtgcgcagggcttccatgacctggcgcgtcacctggtccgcttcatcggaatcgccgcaggccgcttccaggatttcatgggaaaattcattcgtgccttccgtcagggcggcaaagatgccggaagccttttcacgcaccattccttcgtccgtaccgaaaacgaggtgaatggcttgttgttgtaaagtgctggtacccataaaaccgtacccatacggtatcataaaatatgcctcgttaaaagacgtatttgtcatttgaaagttttttcatttgaagagaataggcttaaatagtatcaatagaaccggaatgtcaaaaagcggctggagtcttccaggtccatttttcaggcatctcctcgtgatcaagccgcaaaccgtttgatcgttactacggcagggcatttccatgagatcgactatatggacacgggctttacttgtcatcatgatgacggttatgatgaccgtcgtctccgttgcctattggaggtggaacagccgcgttacggagaagaacgtttccttccggtctgaggtgtttacgatggcgcagcagtccgaactcaaagaggaggacgttcccatcctgcaccagctcaatgaagaatattcacgcgtcgcccggctggtggaacgggtgctggtcagcatagacaccacgggcgtgaccagcgtgccgcagccttccgaagacggcgaatccatgattgaaaaaaggctggcggtccatggcctgggttccggcgtcatcgtcacggaagaggggcatatcattaccgcctaccatgtcattcagaacaagcatgcgctgcgcgtcacgctgagcaacgggaaaagcgtttccgtgcgcctggtaggggtggatccggagctggacatcgccgtgctgcaggtggaaaacccgatggccttcacgcctcttccgttcggcaacagtgacgagattgcacccggcatgatcgtcctggcctgcggcaacccctatggactggggacgacggtttcccgcggcatcatcagcgcccgtgaacgcaagctggtggattccggcctggacctgatccagacggatgccagcatctttcccggcaattccggagggcctctcatcaacatccgcggtgaaatcatcggcatcaacaaatcggtgcttcccaatgtggagaaaaactacgctggcattggctttgccattccctccaatctggtggtgcacagctttgagcagatttgcaggcatggacgccccatgagaggatacctggggctggacattgtgcgcaatactcccccgctccgcagtttcctggactaccatgaagcaggcggcgcagtagtcaacatcgtgaagcccggttccccggcggagcaggcgggccttcagacgggagacgtgatgctgagcttcaatgaagttcccatccagaccgacaaggatgtgaaggaccacattgaaaatctttccatcggcgacaaattccggctgaaaatctggcgcaagggacaaaaaatgaacgtcaccctgaaagtgggggacagcattttaaagaacgttccttctccgtgggaggactttatggaaggagtgggcatgcacctgcgtgaactcaccgctgaggaacagtccatcggcgcgcggggattgctggtcatccaggtgaatccgaagaaatccgtggggcagatcctccaggccggggacatggtctttgccgtgaatcatcagagcgtcagcactatggatgcactggtcagggctttgagggaggggccggccctgctgaccgtttcccgtgacgggcagcagttcaacgtgaaagtggatgcccgcccggtttccgaaaagacgctgctgccccgcattcccacggcgacgaagagcaacgccatcatgccgcgggagctttgaattccgcctgtgcggcgtctgcggaagaccgcatccggagaagcgttttccggcatccttatgccgcgggcttgactggcagtcaaaagcgcctataatgcatcacctttaagaaattaaacttatgactcgtcatactatctccgtacttgttgaaaacaaatttggcgtgcttgcccgcattgccggtttgttcagtggacggggctacaatattcattcgttgaacgttgcccctagccaggacccgcgcttttcacggatgaccatcgtcgtacgcgaaaaggaggatgttctggaccagatcatcaagcatctggaaaaactcgtcaacacggtggaagtagtggatttccgcaacacggacaacgtgtaccgggagacggtattgacccgcatcggcgtggattccgcttcgcggcatgaagtcattgaattctgccagatcctgggcgccagcatcgtggacgtcacgcgggacgccctgaccattgaagtgacgggcggtgagcacaagattgaccgcttcctgtctctcattgaggattacgacgtgcagatgctgacccggagcggccgcatcgcccttcccaaaccccggcagtaaagaaatcctttccggcttttccatcaaccctgcaggacgttcttgcagggtttttttctccctccatcatgaacatcacttatccggacctccccatttcccgccgccgggacgacattctggcggcgatgcgggagcatcaggtcattgtggtggtgggtgaaaccgggtccggcaagaccacccagcttcccaaaatggccatggagcttgccggggaggcgcggggcagggtggggtgcacccagcccagaaggctggccgcggcttccgtttcccgccgtgtggcggaagaactgaattgcgaactgggcggcctggtgggctaccaggtgcgctttgaggaaaaagccgggccggatacgcggttgaagttcatgacggacggcattctgctggcggaaacgcagcatgatccggacctgcgccagtatcataccctgattctggatgaagcccatgaacgcagcctcaacatcgactttctgctgggctacctgaagcttctgctggacaggcggaaggatctgcggctggtcatcagctccgctacgctggatgcgggtggcttttccgagttcttcgggggcgcccccatcgtccaggtggaaggccgtacctatccggtggaccttcattacctgccgcctctgcgtgatgatgaagagctccccgcccatgtggcgcgcgccgtggactggctggacaccctggacgaccgcggggacgtgctcgtcttcctccccggagagcgtgaaatacgtgaagtggcggaaaagctggaaggccggaatttgaggaatacgcgcatcctccccctctttgccaggctgggccttggagaccagcaaaggatttttcatccggaacgcggctgccgccgcatcgtgctggcgaccaacgtggcggaaacatccctgaccattcccggcatcatttacgtcattgactccggcctggcgcgcgtcagccgctacagtccggcgcggcaggtgcagcggcttcagatagaacccgtctccaaggccagcgcgcgccagcgtgctggccgctgcggccgcgtgtgcgagggcgtctgcatccgcctgtacagtgaggaggactgggaggacaggccggacttcacggacccggaaatcaggcgcagcgcgctggccggggctcttctccggatgaaggacctgggtcttccggaaatgccggaattcccccttccggaccctccttcctccaagctggtcacggagggctaccgcaccctgcgggaaatcggcgccctggacaaggcccggcagctcacgcccgtgggcaggaagctggcgcggctgcccattgacccgcggctgggccgcatgctgctggaagcgcagcatgaacaggccttgccggagatgctggtgattgtggccggcctgggcatcatggatccccgggaacgtccggcggatgccgcgcagaaggcggaccaggcccacgcgcagtggaaggatgaagacagcgatttcctgtccctgctcaaactgtggaaggctgcgtggcagttccgggaaggccggcgctggcacaaaaaccagctccggaaatggtgcgggaaaaacttcctcaatttcaaccgcatgatggaatggttcaacctgtgggaagacctttcccggctgctgaaggagaccttgaaatgcaggatcccccccctggaggcggaagtggaacggcaggcttccttcgccatgattcaccggagcatcctggcgggcgttccgcgccagttcggcctctgggatgcggacaaccgggaataccgcggcgccgggggacgctctttcggcatctttcccggttccggcctgttccgccgcaagaagcggagcgaatgggtgatgggcgtggagctggtggacaccacgcgcctgtggatgcgccgcgccgcccggctggagccggaatgggtggaacaggtggctccccatctctgtgaatcccattattccggagcccggtgggacaaagagcagggcgcggtttacgccgtggagcgcgtggtgtgcggcggtctgcgcatcattgacaacaggcgcgtgcactatggccgcatcaatcccgcccatgcgcgggaaatcatgatccgtgaagggctgctgggcggcggtttccgtacgaaacccggatgcatcaggcatctggaaacgctccgggaggaagtgcggcagatagaactgaagctgcgccgcccggaccaggtctggtgcgaggaaggcgtttttgaattctttgacaggctcattccgcaggactgttgcacggccagggcctttctgcgctgggccggaagcatggaaaaagacaacccggaagccctgcacgttccgccgcaggaggccatgtatgatttctggggcagggaccttctggacggctttccggatgaaatttcctgcggcggcgcggaatacgccgtgtattaccagaatgaccccggcgcggaagatgacggcgtgacgctgggcgtccatatcgaccagttgccggacgtgccggaatggctgccggaatggggcgtcccgggccatttggcccagcgggcggaatgcctgctgcgcacccttcccaaggacctgcgcgtctttctccagcccatcagccagaaggccgcatacttcgcagagctgcggcatggcctggatccggacgggccgctggcgcagaagctggcggaattcgtggaagcggaaaccgggcgtttctgcgctccctccttctttgacatgaaccgcattccggcggagctggtcacgaaaatctgggtctgcgacgacgaaggagaagagcttgccatgggtacggacgttgcggagctgaatgcgcggctgggcaaaaagctctcccgccggttccgggaaacagcggcggacatcgtatccgtaaccggaatgaaggaatggacctgcggagatttggagcgcacggtggacgtggcgggaaggccgggttacgtagccctggtggatgaaggcccgtctgtaggcgtccgcgtttttgaggatgaactgcgcgcggaagaagcccaccggagaggctgcctgcgcttcatgcgcctgcgccagacggaccagctcaaccacctccgcaagaaattcccgctgaaactggaagggaagctttccctgcacatgctgggcagggacccgtccaccaatgcggacgacctggtggacgtctccgcggagatcgccatgggccgccccctcccgcgcacggcggaacaattcgccgctgcggaaatgagcctgcgccagaacctctttgacgccgcccacagcgtggcggacgtctgggagttgatagcggccacggagcatgccgccagggactttatggccgcgcagcagggcgtgcgccatacggagcgcatcacggctgatctccggcgccagcttgactggctgctccgctcccgcttcctgtgggcgcatggagcggaacgcctgccggacctgaaacggtacatgcagggcatcgcggaacgcatcaggcgcatcggccagcagcccctggccagggagctggaacgcctggacctctttgaacgcgtgtacctcccctggcatcaggccctgccggaacatgacggcgacccgcgctggacgcagtacggctatctgctggaagaataccgcctggccgtcttcgcccccgctatctccgtcaagggccgtatctctgaaaagcgcttgatgaccgcttttgaagagctgtcctgaaagcccggtttccggaatgggactggtccgggtttacaggcccttggacaactgggcgaattcaatcaggttcgtctccttgccgaacaggatcaggatgtcgtggtcttcaaagacgaggtccggggaaggggtgccaatgacgggaatgcgcgggatggaaagaatttcccggcgcccctgcggggtctgggcttctccgcggcggatggtgagcaggttgagatggtgctccgtgcgcaggcccacgtcccggaggcgtttgcccacccagatgcgcggcacggctatttccacgatgctgtggttctcatccatgggggagacgcgcaggaattccggggattccagctggctggcgagttgcttggaggccacgcgcgacaggttgatgagcgcgtacacgttcatttggcttaaaatgtgctcgtgcaccgggctcatcacgcgggcgtagatgtagcgcacgcccattttctggaggtgcgtgacgacgaggaggttttcttcaaagctgtccccgatggcgacgatgacggcggactggtcgtccagctccagttcccgcagggcggccggattggtataatccgttaccacggcgtaagtcaccaggtccttgatctgctccagttcttcatccgtggaggcgacggccactacttcaatgttgcgggcggaaagctccgtgcagagctcctgtccaaactggcccaggccgataacggtatatctcatgatggtatgttcaggttaacggaattttgacggatggatagcggtaatgccgcggggtaggggtgccggccagcgcgatgaggaaggcgaaaagccccacgcggccggcgagcatgttgatgatgagaagatacttggaagggtcgctcagattgggcgtgattccccgcgacacgcctaccgtagcaaaagcgctgcagttttcaaagaagatatccagtgagctcatggcgggctccaggctgcaaataagaatggtgaaacagccgatccaggcgcaggagaccaccaccgtgatcacgcaccgcgccacggtgcgctggtcaatgcggcggtggaagaattccacgtggtcccggccgcggaggatgcgcaggatttccgcgcccgcaatggcgcaggtggtggttctcatgccgcccgccgtgccgccggggctgccgcccaccaccatcaggccgcacatgatgaggctggccgcgggcaggtagcggctgtagtcgctgatattgaatcccgccgtgcgggccgtgacgctgtcaaaaaggcagctccagaggtgctgccccaacggttcggaagtgtggggggcggaaacggcgaaaatggacagggcgcccccagccagcagaatgcccgtggcgatcatcaccagtttgaaatacggggtccactgcatgcgcaggcggcggtgcttggccagaaagcggttgaccaggcgggagttgatttccttgtaaatgccgaatcccaggccgccgcatacgatcagcgccatgatgacggcctgcccgctgtagcacaggcggatgcccggctccatcagattcatcgggaacgtggaaaaacccgcgttgcagaaggcggaaacggagtggaagagggagtgccaccacaggggttcccccatcaggttgatatcctttccttcccaggaaaagtacaggaggacggccccgcacagttcaatgaacagcgtgctgactacgatggtggtgatgaaggagaccacggaccccaggttcccttcgtccagcaggtccgtcagcagcacgcggtcacgcagggaaaagccctggcccgccaccatggccacgaagtaggcgaacgtcatgatgccgaacccgccgatctggatgagggcaagcgtgaacatttcccccagcggggtgaaagtgctggcgaagtccacggcgttcagcccggtgacgcacacggcgctggtgctggtgaacagggcgtccgtaaagctcagcgtgatgccgggatacgtggaattggggagcagaagcagcccggtgcccgccaggatgaccacccccagggaggtcacaaactgcatggcgggagccatcagcgggcgcccttttttctgcttgcccagcagccattcaaaaatcctggtcagggacatcagcgtggggatggcgatcagccctgccgtaatcaccaggcgggaaagctccgtaaacctcatgtaactgtcctcctgctgctccctggcgatcagcaggaagatcagcaggcagcagataatctggaaaatcagcagcctcagggaagggtggttgatctccttccggaagaaggagcccagcacgcccgtcaaatggcccagcgtggcgacggccgcaatcaggcgcgaccattcatgctccgcatgcgtcaggggccaccccagctcccagatgacggcccccagaaggatggcaatgcagatagctgcaagtttggtaaatcccgagcgtgtggttgtcatgggtggagatgccttgcgcggagtctagcacctggacatggaaagaaaagctattaagccgtttgccccatttcgccctgtttactccggttatttccaacgcgcgcagaggaaaggcggctggggggaggaaggcataacttccagttaaatccccgggctgttcaggtccggtcacggagcgccgcaaaggctggcggcgctcctgctggcttcgggagcagggggaaaaagtcaggccctgcggcgcattgccagcagagccgccatgcccaggagccccagcagggcacaggacggttcggggacggaaagcgtcacgattcccgtggaagcgtcgtaatccagcacattccagccatgggcggcctctgccagggaaaaatcttccgcagaggaaagcccttccagggtaccccctgaaatgtccgtaattctgaaggacatggtgccggcgcgagcaaggatgccgctgacgtccagagtcaggccgtccagcaggttcaaggcgcctcccgtcatgatgatggcggccaacccttcgcctccttccaccagattcgtggatgaaagctccacggtaaaattccccgccgccaggctgtcggccgttcccagcgtcatggaattgccggccaggatacgggagccgtcggacaaggcgagcgttccctccaggtgctggtccgcccagaccacctggtggccgatttctacccgtgcaacggtgccccagttcagcacctcccctccggacaagcggatggtgttggaaacgtcataacggttcaaatccagcgttcctcccatgtgaacggccgccgttcccgtgcccagggcgtttctgtctccgagccgcaaagtgcctccccggatttgggtgcctcccgcataggtattggcatgggccagaaccagcgtattgccggtggtcttggacaaggccccatttccggaaatcccgccggacagggtcaggacttttccggtggcgttggtggagctcccgaaggaggaaacggtgccttcctccagaatgaaacggttgctccacgtattggacgtcacgtgttcccagccggcaaggacggttgccccctggagcgtgacggagcccgttccccagccggagccggcggtcttggtatccgtgccgttcattgttaattccacgccgggaccgacggtccagtttcccgtaaaagcggcggcatccgtattgacgtaggcgctgacctccactctggcgattccggagggatcagccgcaagggtggaattgcggatggcgacgtctcccgttcccgtgatgaacgtgagctgatggttgccggaagaactgctcccccggatggacagggtgcttcctcccgcaatgttccattgctggtcgccctgaagctccagcacggaagcgatgttcaggttttttccggttgcgatgtcgatgccgccgctccccaggatcaaatggccgtcctgcatggagggagcggaactgccgtcaacggccacgccccggatggtgatggtgttcaggtatgtatcttcaatcctgatgccgtaaagcgcggcgttggttccggcggcggaactcaccatgttatccttggcggaggaggctgcgtcccagacggccgtgctgtccacgggaagcttgccgttcatccaggcttccgtggaagagagagcggcgtcgtaatttccgctgcggaccgtacccgtatcatacccggccagcctggccgcctcataggcataccgcgctccgatggtgatctgggactttccgtcgtaatggacgcccatgctgtcgccggaggtgattttggcgaggtcccgtgtcggaacccagcccatgttgtcgtttgcccgggccagggcttcctgctggtcgcgggttgttccggaagaaccttcattgccgttgaatcctcctgtgacgtcccccgtttcagcatttgtgacgttggttgtgccccacttggcctgttctcccagaatggcctgatgtgccgccagagggccggtgtccactccatcccgggcaaggtccccctgcaagttgtccagaaacgttaaaaatgaattggcggcattactgctgtcagtgactgtattggactctccctgaaggtacattacgcccatgatctccaccttgtcgtaaccgttggccagggcgttttcacaggccttcctgacggtctccactatggcattataggcgttcgtgcctttgttccaataggaattgcctcctccgtccagagcggccttgacgattcccatgtccgcatgtccggagccagggccgcccagggaccatcccttgcgctccatcatggcggcaaagccgtactccggccccatgcagttgtaattgcttgactccgttccgcacacctggggtacgacagaaccccaggaagaggaagctggcggattgcagtctacggaactgccggtgatcttgttgaaattattgtgccagaatttggtgcttccatcggacctgtactgttccagcagctccgcggacgccggagaccccttgacggctcccagggaattggattgtcctgtcaggatgtataattgaagcgtcttggcttctgccgcgccgatgaaagccgccgttatggggatgaacagcagactgcggtaaagtgatgaaaatttcatggcagttggattcaaagggataaaaaacaaaagccgctggctgcatgaaaccgccagcggcccgacaagaggaaattttactttctccggcggcgcaggagcaatgcgcccagccccagaaggctcagggaggcagtggccggttccggaacgttgatgatggctgccaggtcatcctgcgttgccgcgccttcccagaagctgaggccggataccgttggggaactctggttcccgttcaaggttgcccagcagccgatatagagctggtccagatttccggcttgggccatgttgggccaggacacggtctgagtggtgccattctgcgtaatgaacacgctgtaggctccccctgcctgaacggagagagtcagtgaaaacgggctgttgaagtcaatggcggtgctgcttaagccgcttgcgggacgtcccgagctgctgccattgttggcgatgcctatcttgccgctttcatagcgtcctacaatggaattaagaccggttccgccaatggaagcgcagaagagggaatccgtgttgtccaggctggcggcgctggagaagttaatgttcaccgtatagccggcagctccggaaagctgaagggaggaaacgtcaagcccgtttttctttgaattggtcgcattggacgtccatgttccgtcgttattccagagagcgtcgttaagcgtccagctgagggacttcgttcccaggtcggaaacagcggtgccgctgtccggtgaagtctggtcaaaccgggaaaatccggaaaccagggtgacggcggcctggccgccggaaatgccgagaagcgtgacggccagaagagaaagtgttttcttcattttattaaacttttgagtaaaaaatactggaaggaagtatttctacccgtttaccggattaagaatccggtttttttatgtgaaatacaaattttgtataacttgcggagcaagtatggaaaggatgaattcaaaaaagaccaggaatactataatgatagtattttcaatgcattaaaatgtacagtaaattaattgttaatattttttattgtttgcggattcttaatccgcagacatttattgaacaggaggaggaaagcgtgtgtaaaatgctttctatacatttatccatttattgaaattcaaggaattgtcttcaaatttgatggaggtgacaaagaaagcctgcaacgggatatttgtaggaaagagacgttttttcccatcataggcatcctgcggcaagccgtattttaggcttcccctttgctggcggtgatggcttgataaggccgtgctggcaaaaagaatcattccatgtctggacgtaacggacggcagagtcgtcaaggggaccaatttcgtcaacctgagggatgccggtgacccggtggaatgcgccagggcatatgatgcccagcaggcggacgagcttgtttttctggacatcaccgcttcttccgacggccgcgccaccatggtggacgtggtgcgccgcacggcggcctgctgcttcatgccgctgaccgtgggaggaggcatccgttccgtaatggacatgcgtgaaatgcttctggcgggcgcggacaaggtgtccctgaatacggcggccatcaaccgtccggaactgatcaatgaaggcgcggcggccttcggcagccagtgcatcgtcgtagccattgacgccaagaggcaggcgcccggcaaatggggcgtttccactcatggcggccgtaaattcgtggggctggatgccgtggaatgggccgtggaggcggaacgccgcggtgccggggaaatcctgctgaccagcatggatgcggacggggccaaaaccgggtacgatattgaactgacccgcgccgtcagcgaggcggtgcgcattcccgtgatcgccagcggaggagcgggcagcctggaccacatggtggacgtgctggtggagggcaaggcggacgccgtgctggcggcttccatcttccacttcggcgaatacacggtgccggaagccaaaacctactttgcctccaggggtattccggtgcgtccgttggcggaatagcggaaacgctcttttttcttgagagaaaatggaattccggtacgtaatgtacgcatgcgccgttttctttttcctctgtgttccgttattgccttaacgtcttttgttcaggcccagtcgccggacaggcaccctctgtacgaacccgccctggtttccgctggagcgccgggtgatgcgggcaatctgtttgccggggccaaagtcaccgcttccgggcattacggcaacgaccgtccggaactggccgtggacggccaggcgagcaacgccggcaaatactggggctgtgagggcattcccgtctggcttcaaatagacatggggaagccccgcgcgctttccgccctgcatgtctggccgtattgggaggggggacgtatttacaaatataaaatagaaggctctgaagacggcaaaaattggaaaatgctggcggaccagtcttccaacagcattgcggccacctcggaaggcgtccccttcaaattcaatccccagacggtccggtacgtcaaaatcaccttcctgggcaacaacgccggcaatgacaagggagggcacctggtggaaatcaagggctacggccctgatgccgccctgaacctgcaagccgcggcggtgaaggattatgaccgcatcccttacagcggcgctcccaggcaggaaatgcttcaggattccgtgcgcctgtccggctggaggggcgaacgcgccgccggacagattgccgtctggtcttcccaggcgcagccccagttatccgctacctgcgccggggtaaaaaatgctgccggacaggtcattcccgtccggacctccatgatacgctacaccaagggaggcaacaggctcatttcagatatcatcggcagtgaaaacagctgtgacctgcaggccgggggcgtgcgtcccgtctgggtggaagttaacattcccccgtccgccaaacccggcgtgtacaagggaaaaatagtggtttccgcggaaagcggctctcccgtgagcgttcccgtagttctggaagtggctccggaatctctgcctgcgcccgccaattggcaggttcacctggacctttggcagcatccgcaggccgtggcgcgctggcatgatgtggaaccgtggtccccggaacatttcgcgctgatgaagccggtgatgaaaaggctggcggatgccgggcagaaggccattacctgctccctgattgatgaagcctggaacgcccagacctacgattggttcccccccatgatcgaatggatcaagggcaagaacggaaccatgcgctggaactacgccaactttgacaaatgggtttccttcatgatcaacgaggtgggcgtcaagggccagatatcctgctacaccatgattccgtggaacatgaaagtccgttatctggatgaagctaccggaaaatacaagttcctggacctcaagccgaacgacccttcctacgaagccatctgggggcctttcctgacggatttccgcaagcacgtcaagagcaagggatggctggacaagacctgcatcgggctggatgaacggccggactccatggtaaaggcggccaagaacgtgctggacaagtatgctccggaattcaagatcgtctccgccgtcaaccggcctaccgccatgacccgggacgtgtatgatgtctctcccgtgctcgaccatgcggacacggtcacgggcgatctcctggcgcagcgcaagaaagaggggaagaagacgacgttctatgtttgcgtccatcccaaaaagcccaacaccttcaccatctccccgctggcggaggcggaatggctgcccctctttgccgccgccaaccatctggacggctttttgaggtgggcctacaactcctggaaccgcaatccgtttgaaaagacggacttcggcaactggcccgcgggagactgctacctggtttatcccggcaacctcagttccctgcggtttgaaaaactccgagacgggctggaagaatttgaaaaggtcaatatcctgcgcgcccgcgccgcgaagaacccgaaggcgaaagccgccgtggcccgcatggatgaggagctttccaagctcttcaccgtggaaagaagccgcggcgattcccatgaggacgacgtgcgcaaggcccgtgaaatcatccgtaaaacgacggaagccgctagatgattttatagcttccgcgttttcgattctttatttttataaaaagcttgtccttgtctttcaggttgctgggggacaacgggcaagctttatttattgttcttccgcctctgggagcgagcagtttgggcagtcctctggactttccacccgtagtggcagcatttatggaatttgcttattttcaacaggagggagtagaggcacgtatcatccgtgtttaattcgtcaagtaatggttgaatcccaaaaaaccgatatttacgatgacattccataaaaatactaaatgcaatgaataacgcaatttcagtaaataacggtaattcccggcatgaaataaagattgaaaacgggaagatgggctcaacgggagcattaaatcagaaacacgatcagggatatgcggaaggcgtcgaatttaaatatggattcatttcttccacggaaggaacttccgaccgtgcttccagaatccggaaatggtatgccctccgcggaacaaaaatagaatactggtccgtagaaagtgatcatgttacatgtgcagaactggattctgacaaaacttccggaggcatcaaacaaaggatcatgttctttgaagacagggactcgtttgacactccggattatgccgcgggattttatgtaatttcgtggaaggaccggggcaggcgcggtgatgatggcaacaaggttaacaatagttaccatgttaaagtcacgctgggagacccgtcgcaaaataccggagaagtaatcgcctcgttgaatgtcaaggagggtgaaattatcccgggggaatggagagacagatgcttgctgatgcgcctcaagcgttcccaggaattcaatacgggaagggaggacatatggctctccatggaatgtgaggaaggcggaacttttggaactttgattacggaagtggatattcatcccgtcaccttgaaagcttttccggctccgctgtttggagtattggagagattggtcgtaccacaggaagatgatcattccgatacgctgggatatgtggacggcaggaatactgacacgattgcatggattgattatgcagagacaggttccggccaggaaagcagccctagaatgccctgtttgcattttgaaataaaagggttggatgccgggcgtttttcctggaaaaccaggctgacggtaagctacagccgcccggcgatccaatatgcagatgcccctgccggaacccgggatcgcaaccgggccgttttggctaaagatacagtacatatcccttccattccggaaaattggaaagaacagccagtgtccttatggaatattgcggaggatacggattggcttgaagaggtgaatgaaggcttttttggaggaaatgccagtctggaatttgaaattaaatccaaaaacggccactcctcctatacaggagcggatatctatcgtttccgcatcggagggcagaatccggacgatcaaatgtgcacccggtatattcagtcctacgtgctgcaaatgtatccggatactttggcctccatggaatggtgtcttcccgccgtaggcaaaagcgaatcatttggatatggcggcgaggcggtttattaccccttctcctggagtaatgccccgtcatccttgtacaatcaatttttggccggaggcggcaagtaccggagggagcccggggcggaaggaattccgcttcatagccaggataccgccggcgccggcggttacggcatttttcaagtgacgggaacggcagggggagacggcatatataccgccatcccaagggagcaaatatggaactggcagaaaaacatccaggcagcccttcaaatcatccttgtcaaatacaatgaggcgcacaggtggatgctccgtcaactccagcagcagcaggcggaagcgcctgaaagtgctctcccggtttatcgtgcggccgataccaatccaggccagggggttccgtatgattattcatttgcggaaggaacggcctgtaccatcgcccagctttgcacgcttaaggcatataacggagcttccaaatgttcccggcagattaacgaacccggcaccaaggtacgctcccccggttttctttatgatcccggaaaaagcggccactactgcgcctggatgaatacttctagacaatggtgcatttccagatataatagcaataattttgattatgtggacagggttctgtccagggtaaatcaaatttagaatgaatgctttaatcacaggattatgctttttatgctgctctgccgccttgttaaaggcggcagagcagccgcctgttttttcccttcatttttcccagcttccttcttttctccagtggaatattcgcaaacaggtttccggacagggcgatcttattgaatcatggacgggctggaatcctgcattaaagaattcagacggccccaacggcggccttgtttttatgcaggaaattgatcttgtgggagaccatggaaaagaaagaattttcctgtaccggaaccctgaaatagctggaactcctcccccgcaggatgaacatgtaaggtttatctgcaatgcggataactcttatctttatacggttccttccttttgcctgcacgggaagaaaatcggcagtgtttttcgtggtgaagaagcttattatttttgtcctgacaggtatgttaacaggtatcgctttacctatggatggaagcaatgggaactgacgggacagtatggcagggtattggaatggagcggctgtgaagagaccaatcccaaagatggaacccgctggaaaagcggcatggagcagacggaaagcgtttatgtaaatacgggcgtcattaagaaaacatgctccctttccccaggcagccgccgggtgcctctttcccaggaaaccgagggtgaagatccgtttgaaacaatagtaaaagaaaagacaaaatcgcctgcatcacctgaacaggaaaaattggcagaggacatgccctctgaaacggtttgggttgtgtccctctttgaacttcttacacaggatgctccccagtggaaatgttttaaggcggtttctttaaaagaggcggaaaaagaatggaggaaaatttccggtcctgcccttgagcaatcccggaaatggaatcagaaagaagccgtgcaggctatggatgcgtttcttaacgtgaagaatccccaaggggtaaaaaattgtcccttattccaatctccggctgaaaccgcattgaaagatgataaaacgccgccgggcagtcccatgggcggggaagaaccgtaaaacagaaatgtccttgatctgcgggcttggcgtgttcatttgctgataggctttccccagcggggacatggggccagaatgggtacattccgcgcacagagttaagaggtacttccgcatgcactttccacgtaagcaggccattttcttccatgaagcgcaaatgcgcgcccgggttcgtggcagtgcaaccggtgcagtttgcctgcggccaccgttatcatgaagtaagtgaagaagtattttacatcatcagggaccatgccgccgtgcgtactccggagggtgaaaagaatctgaagaaggggatgcgctctctccggatgtcggtacccgcttcatgcccgatgtggtgcacttcccggatacggcttccggaatggtatgttcttcctccggcatgcaccatttccaggagtcctgagcagtattcctgctccgggagcgttcttccggtttttccccaggcgcggtctgccttcacgcgggccgcgcctggggaaggagatgcctgggaccgtttttcttcccggcggatagcatgccgggattggtttatttcttgcggggaggaaaggctgcacctatgcttgatgcattcagacaagtcccatgtacggaaatattgttttgcttgcgttgtttctgctgtcatccatcgttccaggggtggagccggacgctgctcattgcttttccgcgaaggggtatttgatcatggattccctgctgtttgcggggtgcttctgtttccagctggtgatgattttcatccagtgcgggaatccgtggaaaggccgcagatgtgaaagaccttccctgaaaaggtttctgctgttccgtggcgcatggagctgcggctactttctggcgtggtttctcgcggctgtcaccgcggggcaggcggtgcacctgctgctgttccgggactggaagaacgggtggctgtggacggacgcgctcggatgcctggcggcctgcgcgggtcttgtggccggacatgccgtgggactgaagctgtggaagaaaagggttctgtgaacctgcgcggaaggcgcccgtatccggcgcgcagaaaagagctctctcctgttgaatgaataaaaacgcccctgccggacgaaccgtgcaggggcgttgaaattcagcggctgtacgctttattccgcggacttgtcggcgcccatgttggcaatgctctggtacaggttccagcggtgccagacgtccttctgggcttcttcaaggagtttttcaaatccttccttgttggtcttcgccagaagcttgaagcggttttcgctgagaagcacgtcgcgaaggtcgcccttcggtcccttgccttccacgatcagcggattcttgccctggagggccaggtccggattgtagcggtagagcaggatgcggccggaatccacccatgccttctgctgctgcaggcccttggccatgttgatgccgtgagagatgcagtgggagtaggcgatgatgatggcggggccgtcataggcttccgcttccacaaaggctttcagcgtatgttcgtccttcgcgccgagggcgacggaagccacgtacacgttcccgtaggtcatggccatgaggcccaggtcctttttcacgccgggcttgccggtcgtggcgaacttggccacggcagcgcgcggggtggacttggagcactggccgccggtgttggagtacacttccgtatccatgaccagcaccttcacgttcctgccgctggccaggatgtggtccaggccgccgtagccgatgtcgtaggcccagccgtcgccgccgaggatccagacgctcttgcggacgagtttgtccgccatggtcaggaggcgtgcgcattccggcttgccggtgattctcttcttgagttcggcgacgttttcacgctgctgcgcgatgtccgcctcatccttctgcgggttggtcaggatctggtccaccagttcctggcccacgatgccggcggcttcatggaggagctcaatggcgtgttccatctgcttgtccagggagacgcggaagccaaggccgaagtcggcgttgtcttcaaacagggagttggaccaggccggtccgcgcccttcggagtcatgggaccacggggtggtgggcaggttgccgccgtagatggaggagcagcccgtagcgttggcgaccactaggcggttgccgaagagctgggagagcattttcacgtacggggtttcaccgcagccggcgcaggcgccggagaattcaaacagcgggcgcagcacctgcatggagcggatgttgtccgtccttaccttggtgcggtccacgtccggaaggctcatgaagaagtcccagttggcttcctccttgtcgtgaatcttcagggtgggcaccatggtcagggccttgtgggtggggtccgtcttgctcttggccgggcagacgtcggagcagagcgtgcagcccgtgcagtcgttcggggagacctggatgacgaatttttcacccttccagtccggatgcttggcatccaggcattcaaagccttccggcgcgccggagagggcgtccggagagaagaacttgctgcggatggcggcgtgcgggcaaacggccgtgcacttgccgcactggatgcagagggcgggatcccattccgggaggtccagggccaggttgcgcttttcgtactgggaagtgccgttcgggaacgtgccgtccacgggcatctggctgacggggatgctgtccccttcgccgcacatcatcttgccgaggacgttctggacgtagtccggagcgtcagcggacatgacgggcggaatggcatggccggtgatggtcttgccggtggtgtccacctggtggaggttttccagcgtggcgtccacggcggcgatgttcttgtccaccacttcctggcccttcttggcgtaggtcttggcgatggctttcttgatgtagccgatggcttcatcagcgggaatcacgccggccagcttgaagaagcaggtctgcatgatcatgttgatgcggccgcccatgcccgttttccgggccacggagaaggcgtcaatcgtgtaaagcttgaggttcttgtccagaatctgctgctgcatgcgggcgggcagcgtgtcccacagcttgtccgcggggtgcgggctgttcatcaggaaggtggcgccgttggcggcgttcttcaggaagtcaaacaggttcagcagcgtgggctggtgcagcgccaggaagttcgccttggtgatcaggtacgtggacttgatcgggcgcgggccgaagcgcaggtgggagatggtggaggaaccggccttcttggagtcgtacacgaagtagccctgaacgtacaggtccgtgtgctggccgatgatcttgatggcgtccttgttggcgcccacggtgccgtcggaaccgaggccgaagaacatggcgcgcgtcacgtcgtccgcttccgtggagtaatcttcatcatacggaaggctggtgcccagcacgtcgtcgttgatgccgatggtgaagtggttcttgggagcgtcctgttccaggctgtcatagacgcccttgaccatggcgggagtgaattccttggaggagaggccgtagcggccgcctaccaccttgggcatgccgttggtgaaggggagcgtgccggagccttgggcgtcaaagagggcctggatgacgtcctggtggagcggttcgccctgggagccgggttccttggtgcggtccagcacggcgatcttcctgaccgtggcggggagcgccttgatcagttccgcggcggggaaggggcggaacaggcgcaccttgagcacgcccaccttggcgttttcacgggcgatcatggcttccaccgtttcttccacagcttccgcgccggaacccatcaggatgatcacgcgttcagcgtccggggcgccggagtagtccaccagatggtaggaacggcccgtgaggtccgcaaacctgtccatggccttctgcacgatggcgggggtggcttcatagaactggttgaccgtttcacggccctggaagtaaacgtccgggttctgggcggtgccgcgcagcacgggagcgtcaggcgtcagggcgcgttcgcggaaggagtccgcccattcctgcttgatcatgccgttgagcgtatcgtccgtgatatctgcaatcttgccgatttcatgggacgtgcggaagccgtcaaagaagttcatgaacggaacgcgggattccagcgtggcggcgtgggaaatggcggcaaagtccgcggcttcctgcgtggaggagccgcacagcatggcccagccgcaggagcgggcgctcatcacgtcgctgtggtcgccgaaaatggagaggccctggtaggccagggaacgggcggccacatggaacacggccggagtcagttcccctgcgatcttgaacatgttcgggatcatcagcaggaggccctgggatgcggtgaaggtagttgccatggctccggtctggagggcgccgtgaacggtgcctgccgcgccgccttcactctgcatttccaccacggagggaacggtgccccacaggttcttccggttgacagcggcccagctttcggctgattcacccatcggagaggacggtgtaatggggtaaatggcaatgacttcagaaaaacgataggctacggaggctacggcttcgttagcgtcaatcgtgctgtaagttacggttgtctgatcactcataagtctgcacggatagtatataattgataaataaggtgcgccttaacggagttatttataacatgtctgacgccgaaggtaaaagcaattatgcgtatgtggggttttgacggctattttttaataataagaccagtttcttttcaattcctttgaatatcgtgccttgcgtggttctcccgctcctttttacagaggctgcggacgggcatccacccccgcgggtgcgtcccccggcgcttggactccggaaaggagggcaaaaaggtccccggttccggacaggccgccaaaaatgccccctgcctgacaatgcactagccaaaacggaggcaagcctttaaaatccccgcactatgtccgaacaacagcaggcacatccgaatacgacggaatccgaacttattgccgtgcgccgcgacaagctcgccaaaatccgcgagctggggattgatccctacggcgcaagatttgacgtgaccaccacccccgccggattgaaagccgatttccaggaagacaaacaggtagccgtggccggccgcctgctggctattcgcgacatgggcaaatcccagtttttcgtcattggagatgtacgtggcaaaatccaggggttcctgcacaggaatgaagtggatgaaaccacctggaagctgtggaagctcctggaccgcggagactggatcggcatggaaggaaccaccttcctgacccgtaccggagaacccaccgtgaaggtctccggcctgaccattctttccaagagcctccgtcccctgccggacaaatggcatggcctggcggacaaggaggtcacctaccgcaagcgccatctggacctcatttccaatgaggaaagcgcgtccctgttcgtcacgcgctccctcatgattgcggaaatccgccgctttctccaggaacgcggctatctggaagtggaaacccccatgcttcaggacgtggccggaggcgccgccgccaagccgtttgaaacgtaccataacgcgctggacatgccgctgacgctgcgcattgctccggaactcttcctcaagcgactgatggtaggcggcttcaccaagatttttgaactcaaccgcagcttccgtaatgaaggcatcgaccgccgccacaatccggaattcacgatgctggaagcctactgcgcctgcggggattttgaaaccatggcgaacatggtggaagaactcatctgccacctggcggaaaaattctgcggaggcctccagatagaccacaaggatgcagaaggcaacgtgctttacacgatcgacctcagccgcccctggaagcgcgccgactaccaggacctgatccgcgccgtggccgggcaggactggtttgacatttctcccgaggcgcgccgcgcccgctgtgaggagctggatgtggaaatcagcccggacatgaaggatgtggacgtttcccagcaggtttatgaaaagctggtggaggaaaaaaccatgaatccctgcttcgtcacccatgtggccaaggacctggttcccctcgccaagctgaacaaagaaaacccggacgtggtggacgtgtatgaactggtaatcaacgggcaggaaatttccccggttactcggagctgaacgatccggacgtgcagaaagagcgcctggaacaccaggccgccggggaaacccagcgcgtggactacgacttcattgaaacgctggaatacggcatgccctccgcaggcggcatcggcatcggcattgaccgcgtcatcatgatgctgacgggcgcctcttccatccgcgacgtcctgctcttcccgcaactgaaacggaaggacagttaattcagccccccagccgcatggccccccccaccccggataccctggactgcgcttccgcccaatggatcggcaaacgccgtgagcaggaagacgtggttaaaagccttcccgccgccggcgggatgctgggcatcgtgtgcgacggcatggggggccatctccgcggagactgcgcctcctgcgtggtggcgcaggaatttgccgcagtatttgcggaaagcggcgtggaggatattccggagcgtctgacggaagcgctgcatgccgccaaccgggcgctggccgccatccagaaggagccggaggaatccggaaccacgctgctggccgtcttcatccgcggccactccctgtggtggatcagcgtgggggattcccccctgtacttatggagcggagcggacagcttccgcatggaccgcctgaatgaagaccactccatgaggcccattgcggattgcctctaccggaagggggaaatgtccctccagggcgctctgcgccagcgctgcgttctgcggtccgccgtcatggggggggccatggaactggtggacatcagcgccatgcccctgcttctgcatccgggggatgcggtgctggcctgctcggacggcttgcaggtctggagcgaactgctgagggagccttctttcctggctctccaaaaggccagggactgttccagccgggagctggtgggaaccatcatggagcaggtgaaggacatgctggaaccgcagcaggacaatgcctccgtctgggccgccgtgatgcggaaaccctgcacggacggtaaataaacccgttccggaaaaggaaaaataagaccgggggcatcttccccacgagcgcggggcgagcctgtgccgtttttactgcgtcgctttttaaaagagggcctttcctccggacgggggcggtgcaggaagccttctggaaatccggtgccggggaaggccgttgaacgttccgctgttccgcgggagcaggccgccggaaagaagcgtcccggagacgatttccccattgtcatttgacgggcgggggggtagaataccctccgcacgacatgattgcctggatagttctctatattgcagcctcctacctggttggagcggttccgttcggctaccttgccggcaggatcaggggccttgacctgaggcgggagggttcctgcaacataggcgctaccaatgcatggcgcgtgctgggctggaagtggggcctctccgtttttgcgctggattttttaaaggggttcgtgcccgtgttcggcgccctgaactggctgccgttcctgacgggggatgcgggcggctgggacttcaacgccgtagtcgtcctcgtctgtttcgccgtggtgctcggccatacctatacctgtttccttgggttcaggggcggaaagggcgtggcgacgactgcgggcgtcttgtttgccctcaatccggtggtggcctgcgtggccctgggtgcgtggctggtattcatgggaatctccggcatcgtgtcgctgtccagcctggtggctgccgtggcgatgatcgccgccggatggtggttctacccgctttgccagggcggggccgtttctccccagatactttacattgcctttttcacggtggtgggggctctggtcattctcaagcaccgttccaacatcgtgaggctcctcaacggaacggaacactccttctattccaaaaagtccaagtaagatgatgaatcggttacataaaatagcagtcatcggcgccggttcctggggtacggccctctccatggtcctggcgacccgggaatgtgaagtcgtcctgtggacgccggaagaagcgcaggcccggcagcttgctgaaaccaggcgcagcccggtcctgtcggaaaccgccgcgcccctggcccccaacatccatcccacttgcgacctggaccaggtgaaggacgcggagctcatcgtggtggtggtgccttccgtagccatgcgttccgtagcgcagcggctgcgtgacctgccggtgaggccggacgccgtcatcgtctcctgcaccaagggcattgaacagggctcccataaaagaatgacggaaatccttcaggaatatctgccctccaatcccataggcgtgctctccggccccaaccatgcggaagacatctgcctgggcctcccgtccgcctccctgatcgggtttgaggatccgaaatatgcggactgggtgcagcagatattcgcctccaagaccttccgcgtttattccgctacggacatcatcggcatgcagctggggggaaccatcaagaacgtctttgccatcggggccggactgtgcgaggggctgaacctgggagataacgcccaggccgccctgctgacccgcggcctggcggaaatgacgcgcatcggcgtagccagcggaggccgcagggaaaccttcatgggcctttccggcgtgggcgatctcatcgtcacctgctattcccgccactcccgcaaccagacggtggggcggaggctggcggaaggaaaaagcctccaggaaattctggacgtcctgggcatggtggcggaaggggtgcccaacacgctctccgtctatgaaattgcgcggaagctgggagtgaggacgccgctgattgacgccgtctattccgttctttatgaatccaagccgcccatggaagcgcttgtggaactcatgacgcgggacccccgtccggaattagattgattttttgtttttttgagttgctttccctcgacaaattatactatataaacaatcagtatgaaacgtgccatcatctcagctctttttgccgccggcgccatcggtgtcgccagtgcggacattcaggctccacccgcttccgaatacacccccacccgcaagctgggccgcgccatcgccaacatcatttactccgttgaagaaattcccctgggaatcatcaactggacgagccgcgaaggtgactatgccggtttttccgtgggcattgttgatggcaccaccaccatgcttgaacgcatgggctacggcatctatgaacttgtcacgttctgggctcccacctacaagtgcacgtacaagcccccctatcagggacgttgcggcatgagcggccttaaggaatacaatcccaacggcggcctgagcgaattccctgcggaactcagcttccagagctactacaagtactcccgccagcagcgcgactaaggtcactgttaaaaatttcaaaagggctgtctgtaatgaagcagacagccctttttatatggtgcggttgagtggtcttgacaatagccgccattgacgggaaaagggggaaaacgtattcttccgtaccggaaaggctttcccatcatgaataaaacagttgctttcatcggcctgggcgctgccgtctgcatgacggcccccgcatttgcccaggacacccatctttccctgaccaaggagagcgttgccagcatgcatgaaatcacggcggcgctggacaaggtgacggacgagcccggagcggcggacgccgtgaaaacggtcaaaaaggtgcgtgaaaagctggtggacctcggaaaaaggcagcttgaacttcccggcgccacgccgcaggagcaggcgcagatttccgcccagatgacggaagtgcagaaaatttccggtgaattggtgaaatcccttgcgcgcttgaaaaaggaaggtctgctcacgcccgatttgcagaaggccctgatggatttgcagtccgtgcagacggaactggcgcaggcttcccaggacaaggccgcgcaggcggagccgttcccgaaggatgcggagggcaacacgcatgaaaccctgctggcaaaaaccgtggatgaagtcaaaaacctggatgaatccctgtccagggtgaaggatgaggaaaccagcaaggccgctgtggaccagatagggcattaccgggccgccctgctggacatcgccaagaaacaggccgccctgccgcccctcacccgcaaccagcaggccaagctgacgggagtgcagcagcagcttgtggaaatgatgcagcccatcgtcaagcatgtgacggccatcatgctctctccggatgcctccaggaatttgaaggaggccctgaattccctttccgaactgcccaaggaagttcagaaaatccgtgaagaggcggccaagtgaactttttgggggaatgcccctcttttggactggtcaaaaattataattgttctaaagtggctgtcctgaggaatgcgaccgatttttagtgaaacagatctcaatgaacgccccttcctggttttctgggaagtgacgcgcgcctgcgcgctggcgtgcaagcattgccgcgccgtagcccagccgcggccccatcctgatgaactgacccatgaggaagccctgcgcctgattgaccagctggcggagctgcggccccccatgctggtgctgacgggcggagaccccgtcatgaggccggacattctggaattgatccgcgcggccgccggcaaggggctgcacgtggcgttaagccccgccgctacagcccggctgctgcatgcggactttcatgccttgaaggaggccggagttcaaagcatgtccctgagcctggacggtgcgcatgaggccacccatgacgccttccgcggcgttccccacacgtatgagcggaccctgcgcgcggcggaaatggcgaaggaagcgggcatgcacctgcaaatcaacaccaccatcaccaaaagcaccctgggcgagtttgacgactttgtggagctgatgaagaagatggagccgggcatgtggagcgtgttcctgctggtgcctacgggccgggccgccatggatgaaatgcccacggcggaagaagtggaggccgtctgggaaaaactcagcaaggtaagccgtgaagtccccttcggcgtcaagaccacggaagggcaccattaccgccgcgtggcgcttcaggaagcccgcgcgcaggggagcaagcccgcgcgccgcgccgttcccacccgggacggcaagggaatcatgttcatctcccataccggggaaatccagccttccggcttcctgcccattgcggcgggaaacgtgcgaacggatgatccgggggaaatttaccgcacgcacccccttttcctcaaactccgggacgacaatgctctggaaggcaaatgcggccggtgcgagtaccgcaccgtatgcggcggctcccgttcccgcgcctatgccgtttacggagacatgatggcggaagacaacctctgcccctaccagcccaggctttcacaacaccatgattaatattaccagactttggacaggggcggaacagcccgcggaccatttaagatacgggcagggccacgggcacggccgctctgcgggaggcgccgtggaatcctgcgccccggcttcgtcccgcgtccgcaagcccattgtggtctggaacatcacgcgcacctgcaacctcaagtgcgtgcactgctacgcggatgcctccgcccggaaatttgaaggggagctggactgggaccagtgctgcgcggtcattgacgatctggcggactacaaggtaaacgccctgctgttttccggcggggagccgctggtgcatccgcgcttcatggagctgctggaacgcgccaccgggaaggggctgaaggtgaccatctccacgaacggcacccgcattacgccggaggccgccgcgcggttcaaggaactgggcgtggcgtacgtgggcatttccctggacggcatcggcgccgtgcatgacaagttccgcggagtggaaggctcctttgaacaggcggtgcgcggtttcaagctctgcagtgaagtggggcagaagacgggcctgcgcctgacgctgactcgtaacaacgttcagtgcatggaagagattctggacttcattgacgccaatgacatccagcgcgtctgcttctaccatctggtccccacgggccgcggcgtggaagtgcagacgttgacgcaggaggaagcgcggaacgccatggatacgctgattgcccgcgtggaggaatggaaggcggaaggcaaaaaccgtgaagtgctgaccgtcacccagccagcggacggcatttacctgctgctgcgccagctccgggaaggctccccgctggcgaaggaaaccctgaaccttcttcaatggaacggcggcggggcgaacagctccggccgcggcatcgccaacattgacacgcagggcgtggtgcacccggaccaattctggcaatccgtcacgctgggcaatgtgaagaacaacctgttttccgatctgtgggacgccaaggcgggggccgcggcggagatgctgcctgagttgcgcgggtccgacaatcccctggaacggcagaaaaaaattgaaggccgctgcggccgctgcgtgcactttgccctgtgcggcggtggcttccgcacgcgcgccgcgtttgccaacgggcactggtacgggtccgaccccggctgctacctgacggaagaggaaatttccacccctctgccggaaatcaggtaaaatccgcaggctgttcccttctccggaagaagctccaaatacggtggcatatttctcaggccgtctttgggaacaagagcctcccggcacttgaacgcggctgattgtaaccgcgaaggcggggaggcagggagcggctggaaatgcctcctttccctgctttacaagggaggcggcatggcatagcatccctgcatcatgagtcaggaattgagaccggaaaccctgtgcgtgcaggcgggttggacccccagaaagggtgaaccccgcgtattgcccatttaccagagcaccacgttcaagtatgaaaccagcgaacaaatggccaaactgttcgatctggaggaagccggattcttctatacgcgcctccagaaccccaccaatgaggcggttgccagaaaaatcgccgaactggaaggcggcgtggccgccattctgacctcttccgggcaggcggcctccttctttgccgtcttcaacatctgcgaggcgggggaccacatcgtcagcaccgcgtccatttacggaggcacgtacaacctttttgccgtcacgttccggaaaatgggcattgaggtcacctttgtggaccaggacgccccggcggaggaaatcgccaaagccttccgtcccaatacgaaggccctctttgcggaaaccatctccaaccccacgctttgcgtgctggacatccgcaaaatggcggacatcgcccatgcgcacggcgtccccctgatcgtggacaacaccttcgccacccccatcaactgccgcccctttgaatggggggcggatatcgtcacccactccaccaccaagtacatggacggccatgccgcggcggtgggcggcgtgatcgtggacagcggcaactttgactgggaagcccacagggacaaattcccgggcctgacggagccggacccttcctatcacgggctttcttacagcaagagcttcggcaagggcgcctacatcaccaaggcgaccgtccagctcatgcgcgacctgggttccattcaatccccgcagaatgccttcctgctcaacctgggcctggaaaccctccacctgcgcgtgccgcggcactgtgaaaacgcgcaaaaggtggcggaattcctgcaagggcaggaggatgtggcctggatcaactatccgggcctgccgtccaacaaataccatgacctggcgcagaagcaattccgcaacgggcaatcctgcggcgtagtgaccttcggcatcaagggcggccgtgaacgcgccatcaagttcatggacagcctgaaactggccgccatcgttacccatgtggcggattcccgcacctgcgtcctccatcccgccagccatacgcaccgccagttgacggatgagcagctcatggaggcgggcgtccggccggacctcatccggttctccgtgggaacggaagccgtggaagacatcattgcggacctcaagcaggctctggaagccatccgttaaaccggtctttcctttctcgtgcgaacagccgttccgcgcatgtccgcggagcggctgttctgcgtgggtgacgggtgaaaaagccgggatggcccggcgtattgaacgtttccggaaaagagcgccggcagacgggagggcgaggcatatgctcccgctggggaaagaccgtttccgggagcaggggcctcccggctcctgtaaaaacctgcggaaactccgcagaaaaataacttcatttcatgttctccttattccaaagtttaattccacgtaaaacaggtattttaatagggttataaagaaaaatccagcaacggcgaattacggggaacggctcggccattcaacctcaagaagatgcgccagatttcagaaaaagcggaaaattcaaagacttttcttcttaaatgtaaattgacacaccataataaatttattatggtgtgtaacttatgaaaaatagatattgtgctgtattaataagttgcgccagtgtgctggctgcaaatgctgctaccatcattgccgaactgcccgaatcagccaatctgtcgcaaaccgcgaccatggcgccgcaaacgggaaaccagctgctggataaagtaaaaggccgtgaatttggcgtctatgcgggaggcaataacaacagcctggccaactggccccagaatggggagggaacctgggtcaaccatgatgacgtcggttccatcatcctgtgcggcagaagcggcgtggccggagactcctttgccatggtgctgggcggcccccggcagggagagcttgtttcctccatcatcttttcctgtgacacgcccacctccgtcatcacgagctacaccatggtgctggcgatttacgactccgccggaacgttggtccggaacctttccaccgtggaaagctttacctttgattccacttcaagaacgacgaccgtttccctggacatggcggattctcccctggcgtggggggaaggatacaagctggttgccggagtgcgcggcggcgcgggcggcgccacctccccctatacgcttgccaacatccaggtatcctatgaaaccgttccggaaccggctaccgcatctctgggaatgcttggcctgggagccctcgtcttccggcgttcccggaaccggtgagcggtaaacttttcaatcgggaaggaggcggcctgaaaaacgcctcctttcctttttccggtcggaaaaggcacgctttggcatggcgtaacgcggcattccggaatggttcattcccggagagaatgttcaaaggcccggtactgcacggcctcatacaaatgggaatcctgaatatcagggctgccctccagatccgctatggtgcgggccaccttcagaatgcggtcgtaggctctggcggaaagggccagttcttccacggcgcggagcaggatggcgcggctttccggcagcaggcggcaatgcctctggagcgcttttccggaaagtgccgcattgctgcggaagggagtgcccgcatatctgctgcactggagctgccgggcggccatcacgcgttccctgatgccggcggaacattccccggcgggtgcggaggccagaatagaggggtccacggcgggaacttccatcagcaagtcgaaccggtccagaagcggtcctgaaatcttgcggcggtagcgtgcgacctgcgccgggggacaggtgcaggttcttctcctgtcgcccagatagccgcaggggcacggattcatggcggctgccagcatgaagcggcacggaaacgtcatggtgccggaagcgcgggaaatgaccacctggccggattccagcggttgccgcagagtttccagcgcggcgcggcggaactccggcaattcgtccagaaagagcacgccgttgtgggccagggacacttcccccggcgtgatattcgctcctccgcccatcagcccggcatcggaaatggtatggtgcggagcccggaacggacgccgggccaccaggccgttcccccgtttcagcagtccgcatacggaatggattttactggtttccagagcttcctccggattcagcggagggagaatggtcgggagcctctgcgccagcatggacttgcccgaacccggagaaccgcagagaaggatgttatggccgcctgccgccgcaatctccatggcgcggcgcgcatagggctgccccttgatctcgtcgaagtcaacggcagtctccttgtcttcggcctcccggtcctctcttccggaagccgtgaagggagggggcagaacggaggaggtaaggagtgcccacgcctccttcaaagaagccacggggtaaatctccacgccctgcacgggcgttccttcgtgtgcgttagcacgtggcagcatgatgcgcttcctgcccatgcgccgcgcctccataatctgcggcaggatgccctgcacggggcgtacggcgccatccagggccaattcccccacgatgcaccaggaagaagcgtccatgtccctttccgccgctccggcgaccattcccagggcgatggggaggtcaaaccccggtccctgcttccttaaatccgccggagccagattgacgacgaaaacgccctgctggaagggcagcccgctgttctggatggccgtatccacgcgctgcccgctctccttcacggccgcatcaggcagccccacgataaaggtgcgtttttccgccatggggcgaaaatccacttccacctccacttctacgccatccacgcccagaacggtggaggaatacagccgcgtcatcattcctccatgctaggaggaaataataaaaaagaaagaaaaataacaaaaatacggggaatatctaacaaataattcaacggcgggaggcgcgccggagaacttcccgttcctcttccgtcaggctggacaggccggagcgggatattttttccatgatttcatccacctcctcttcggagggatggttaccggcggggcggcgtgcggagtgcgaggtggaatggtgggaggaagaaacgacccgccgcctgggagaggacagtttttccttccacaggatcagcaatgtcaggatgaacccggcgaacatgccgcccaggtgtccggcttccccgcccgcgttgttccactggaaaataatgacggcgcaggcgatgccgaggacggccagggcgaactggcgcacgctcaaattgaccggagggaacagaagctgcacccgggcgcgcggaaaaagcaccgcgcacgcggccatgatgccgtaaatggagccggaggcccccaccatgggaatgaagcgccattccggatcaaagaaccccatgtaccccagcagggaggaaaacagggccgccgccacgccgcagaaaagataatacagcaggaagcgcagatggccgaagcgttcctccacgaccggcccgaaaaaccacagggcgatcatgttgaacataatgtgccccagattggcgtgcaggaactggtaggtgaacaatcgccacaattccccttcatgaaagcacgtgtattcactgtaggccccgtaaagctggatcaggtccagacggcccggcgggtaaatatcccgtggaatatccacctggaagaaaaacccgaggataaagacgaccacattgagcaggatcagccagtgcaccatcacggcgccgcgctggtcaaacaaatgctcccgtaccgtatctccccagttctcgttctccgctcgcatataaggccgcatgtaatcgtgttcagggcgttttgacaaggaaaatagctgtcccgttcaaggaagtacgggaaccgcgccgcattatttccatagcgcggcgggcagcaggtccggcggcagttccgccccgtgcacaagatgttccgccagctgggccgcggcccacggggaagtggtcactcccttgctgcccagtccggagaagacgaactggccgttcaggccgggaatgggcccggcgacgggctggctgcgccggatgatggggcgcacggcggctcgggcgcggaggaagcccgtctccccggaatagcgtttgacgaggtccagcatcaattcctggacggcgggggcttccggaatgccgggagcgtcccacgcccacgcgtaagtggcgccgaagcgccagaaagaaccgttgtgaaccagccagtggccgaaatgcaggatgccggcgtgccagtccagctccttcaggtccaggtccagaatagtgcccttggaagggcgtcccttcaagggagccatgtccgggtggcatccggcttcccagccggtgcaccaggctatatgggaaaacgtctggccgttccaatggaaaaggccgttttcatccggacggatatccgcaggggacacgtccgcttccacaaaacggccctgttccgtgaaaaacctccgcatggcgttgaccatgtcctccacgtgcagcacggcggagccgcgcgtataggcggcttttccgcggccttcccagtgttcaggccatgggaaaagggggcccgcataggcgcaggactccggggccgtctggcgttcctgccagacttccagttggtcctccgtttccagttcccggaaaataggggtcttctgccaccaggagccgcccagttcccgttccgtctccggataaaaggcctccgctgcggacaggcattcctcctgccgccagccggggcggaaggcccggcccgtcaggggattcaccaatccagccgccacccgggaggccgtttccgcgatggggcggtccgcaatcgtgaaatccgcgccgcggcgtttcaactcccacgccaggcagctgccggcgattccctggccaatgataagaacgttcatgataggtggatgaagaaccggagaaatccggaagtgaggaaaaaacagaggaacagtccagccttcctccggaaggaaaaatgccccgcaggggatggaagcgcctgcggagctggaaaaacggcccttttacagggctgcgatgatggcatcccccatttccgccgtattcacgcggatttctccgggagcgcccgtagccaggtcgcccgtgcggcagccctggtcaatcacgcggcggacggcggcgtcaatggcgtctgccgcggctttttctcccagggagtagcgcagcagcatggagagggaaagaatctgggcgatcgggttcgcaatgcccttgccggcaatgtccggggcggaaccgccggagggctcgtaaaggccgaagaacaggccgttgtcctgcgcgccctggcacaggctggcgctgggcagcatgcccagggagccgcaaatcatggccatttcatcggaaagaatatctccgaacaggttctccgtcaccagcacgtcaaactggcggggattgcgcaccagctgcatggcggcattgtccacgtacatgtggagcagttccacgtccggataatccctggaaacctcaatcatcgtctcgcgccacagcagggaattggtcagcacgttggccttgtccacgctggtgacgcgcttgcggcgccctcgcgcggcctcgaacgccactttggcgatgcgcaccatctcgctcttgtggtagcgcatggtatccacgacgacttcgtcgtccccctcctgttcgcggaaacggggctggccgaagtacaggccgccggtcagttcccggacgcataaaatgtcaaaaccgccctcgatcagttcattcttgatgggagaggcgtgggtcagggcaggcaggcatacgcccgggcgcaggttggcgtacaggccgaaatgctttctcagcggcagcagggcgccgcgctccggctgttcattggcgggaaggtgctcccacttgggaccgcctacggagccgaacaggacggcgtccgcctcttcacaggcgcggatggtctcttccggaagggccttgccgcaatggtcgatgcccgcgccgcccacaaaagcctccttgcggctcacggtaaatccaaacttggcacttacggcgtccagaactttcagggcctccgccatgacctcgggcccgatgccgtcgccggccagaacagcaatatgatggtgatgttcactcatgtcgctgaaagtctgggcattctcccctcaaaggtcaagaagcaccgttggcatgcccacgccgcggaagcctttttgcgtcaaaaagcctacagaaacaaaaaagtacttgccaaacgcctgtgcctccagtaaaaatccctccgcgctccatggaacgcaaactcccctgtagctcagcggtagagcgggtgactgttaatcactaggtcgttggttcgagcccaaccgggggagccattaataagagcctcattccgaaaggattgaggctcttttcttttatctgtatcagccttcttccatatctgttcgctaccctgaaaagcgcctaaaacggcacaaaaaggaatatatttttctgactattttctgacaatagataccatttctattcagtagtctggtagcagataaaaaacatcaccgtagagttacccctgcgatgatgttgatgtgattccctgaaatcagtggtcagggaaatatttctgactaagggcataggtgaggtctccccagtaggaatcatccccacgtacacttcgtgccgttaatatgattttcttgtgactgactttcagcacggcatgttctacttgcccaggagagaccaacttcttgaggtcacgttttgataaagggctgtcaagaagaaggctgccctgcttacggagtatcctaccagaattctttcctcttaaaagtggaagagaatcaagaaggatgactttcaatcggacggatgaaagggaatccatatgcagattctgcatttctacataagcgtaaggggcatctcctattagtccggaacattcaattgagagaatgcaggcaataacaggaggacattgttgtgaatgatataatatactcatagcaagtatatatggcatttctgagatgtctttttcaggctgcggaaacgatgaaataacgctgttgacagcgtcatctatatgtgacggcttcattatccgccgtcatgttctcatgactccattctatgcactccgccatcaggtgaggcggctggatgaagaactctgcggcaatggcgggaagtatccgaccggagatgttctgttttcaggtgaggggaaacgaatcgttctgggaaaacccattgcggaaggcggtgaaggatcggtctttactgcccattcggcattaggatcgccactcgtagccaagctctatcatccaacgcaacggatgcgttggcgtgagcagaagcttcggctgatgtgttcccgccccattcgttccccgtgcgtggcgtggccgcgcgagatcctgtacgacgaactgcggcgctttgtcggcgtgctgatgccccgggcggacggtgttccgctcggggcattcgcgtttcatgcggaactgctgacgaaccagttcccctcatggacccgttacgatctgaccaggctatgcctgaacctgtcggaatcagtccatacgctgcaccgttgcggtgtcgtcctgggcgatctgcatcccggcaatgtgctggtttctcctgatggctccatctgctgggtggatgccgacagttttcaggtcgaggactatccctgttccgtcggcacggaacggttccgggcaccggaacttagaggtaactacggagacttcctccgtgcccgcagccacgatgcctacgccctgtccgtcctgctcttcatgacattggctctcggcctgtctccctttgcccggcaagggggagaaggagacatgcgggaagccgccggaaagggcatactgccgtacccgtttgcttcgtacaagcctccggcgggattctacccgcccgatacccccggacgctatgtctggtcgtatctcccccgcaagctccgcgatgctctcggtcacaatcttacctgtgtccagcgtcgcgatttgcgtccacgcgtcatgccggggtatctggcgcgttgtttgcagcaatacctcagggatatggaaccgggaggcggaagggatcatcccatgtaccgggatcttctgcatgaccgtccctgtccgccccacagtctgctggtgcagatgacacccaatgtctgtacagactgcgggattctcttccgggaggctcctgacgatgtcgcacggcgtttacggcaatctcatgccaaatctttatgcaagctctgcatacggcgtcgtagcgcattgaatcaggcaacccggaatccaaccaccaaccattaacttgaataaactatgtctatatcatcatcgacacaaccaaacaaacaggaacagctcgccgccatgcgcgagttcggtaacaacaccaacgcccggcttcccgttctcttcctgctggatgccagcagcagtatgaacggcatcgtccggggcgacaaccaacacatcgtccgtcaggagtattctgacgggatcaactggaatatcgtcacgggagacaacattgtcacccggatggacgaactcaatactggccttcagtggttcatcagcgacattcttgccgatcctctggcaaaactggccgctgacgtagcggtgatcacattcgcttggacaacgacgacagtgaaagaattcggcccgatccgtgaatcggactcagatcttaaaatcaccacatcccgagaaaacgaaacactccttggcgaagccgtcgagctggctctgaccgaacttgacagtcgcaagagaacttaccaggaacacggggtcgaatactaccagccctggcttgtcgtgatgacggacggagtaccaaccagcgcccggcaccgggaattgcaggaacatctgaaagaactgtcggccagccgcaagctcagcgtgttcgtcttcggtattggccgcgctgacctgtcggagctttccttcatcagcccgggacggcctcccatgcaaatcaacgatcagaagttcacggaactgttcgcatggctgagccgcagcgtccgaatggtcagtatgtctatgccgggtgacggggtatctctgactcctcccccggaggatgtgtggcaggtgtaggacaggtaaaatcagaaagtctctctcatgggggctttcttttagttacgacagaatcgccaggaaatcagttgtcgtaaattcataatctcccgtatgattcttgttcatacggttatgattaacctaaaatagccggaccgcttattttaagttcatctgtttttctaaaatagcgattcgctctctttcaggtttcctacagactcaatgggtagattcatggagcagttgaactggaaatttttctatacccgtctgaagcctctattgaatgtaacagtatcgttccctctactgaaagttatcctgatattgtaacaccttcattacatgaagggacaactcaatatcatcggcgatgccgtccgcaaataccgcagagctaaaaaatggactcagcatgtccatgccaggcgacggggtatcgttgactcctctcccccggatggcatctgacaggtacagggtagaaaatatcaaaagcctttctcgaaagatttgtaaataagatatttatcctaatttggaaggagtgtgttattcacatcctccccccaaagctttgtatagcatcacgagattttggagttgggcggaacgaatggaaatcagatcctgttgggcggaaaaaagatcctgctgagccgtgagtacgtcaaggtatccagtgatgccgttgttgtatttaatctgggagaattccaacctcctctgttgcgtagcaacaagcgcctgttgcgcttcaagctgcttccggtattcacgccgggctaccagagcatccgacacttcccggaaggcggtctgaattgttttttcgtaattggcgatttcaatgcgtttgccgattctggaagcatccagcgaggccttgtttctgcctcctgtgaaaatggggagagaaacctgcggggaaaaagaccatgcacgtcctggtttgtcgaaaagcctggaaagttcggaactttccccacccatactgccggtgagcgtaatgctggggaagaatgcggcccgggacgccccgatattggcattggccgcccgcagcgcatgttcggcggccagaatatcgggtctgcgcgtgatcaaattcgaaggaagtcccgccggaatatcggcaacgaggtaacgtctttccagggaacggcttgccattttttctccgacaatcggcttgctcgtcagttcttcaagggcatgggccgcctgggtcatgagacggctgtaagcatgtacgctggcgcgggccgtttcaatctggacatccatcatggccaagttgctttccgggtctttcccaaactggactttccgctttgtcatgtctgcataattttgtacagtatcaagcgttttgcgggaaagatccagttgttcggcatactccagataggcaaagtactggacggcaacctgtgcaatcaacgcaatctgcgtactgcggcgcgtttcttccagagcaaagtaatcttccagggcggcttgtgcactgctcctgattttgccaaacaaatcaacttcataggaagtcaggttcactgaagcattgtaccggtttccggtggaattgttggcgcgttcccgggtaaaggctcctgatccattaacggatggcagcaaggcggacttttcaatacggtattgagcgtgtgcctgttctactttcaaggcggcaatttggaggtcgcggttgttgtcaagggaatcagctatgtattgtctcaagcgggaatccaggaaaaactgccgccagcttaccggagacacatgttcagacaaagttccgcttcccggatatgttccgggtacgggagattccgggcgttcatactccgggataaatgagcagccacccatgagggagaccgcaatcccggccgataatagatgtggcaatttcttacacatgggcagtctcctttccgtggctggaggaagattcggaaacggatgcagaatccgatgcctctccggggagttgtctgggttttacgcggaataattgaaggatgctgacaaaataggcggggatgaaaaacaggccaagaatcgttgtggcaagcactcctccgacaaccccgatgccgacagcgttctgggtttcggaacctgggccgctgctgacggccagggggagaacaccaagaccgaaggcgagcgaagtcatcagcacgggccgcacacgttggcgcagggcatggacggttgcggcaatgaggtttttaccctgatcgtattcttccttggcaaattccacgatcagaatggcatttttggccgtaaggccgataatagtaataagagccacctggaaatagacgtcgttgggcaaatcgaacaagccgcatgccgccagtacgccgaatgctccgaagggcatgatgagcagaacggaaacggggatggcccaattttcataaagagaagcgaggcagaggaagacaaaaaggagcgccaggccgtaaagagccatggtgttggagccagccagccgttcttcataggaactgtcaatccaggaataaccgatgcctgccgggagctgacggatcagttcttccattgcgtccatggcctgccccgtgctgtatccgggggctgcttctcctgcgacggacatggaggaaaccccattgaaacgcgtcaattttggagaccccgcctgccattgcgccgtgatgaaagaagaaaaggacaccatatcaccgtcttcattgcgcacataccagttggtgatgtcttcaggctgcatccggaagggagcgtcaccctgagcgtagacctttttcactcgtccacggtcgatgaaatcatccagataggtgcttccaaagatatgggacaattcgttgttgatggtctccgccgatactcccaggaccccggctttctcgtagtcgatatcgagccgcagatcggttttatcatcaagcgtaccgcttcggacagaacgcagggaggggtgttttgcggcaagggcgatcagctgctgctgggccgcgacaagaccgtcgtgaccaagattgccgttatcaatcaggtaaagttcaaatccgctggagttggccagctcttgaatcggaggcggaaccatgacaaatgtacttgcttcacgaatcctggaaaaaatggccatcgcccgaccctgaatgccgctcgcgctttgccccggatttttgcgctgttcccaatctttgagtttaatgaaacaggcgagctggttctggcccgaaccgccaaaaccgaatcctaccgttgcaaacacgtcctccacggaatcgggcatttccgtcaaaaaaccttccgtaatcttgtttgcaacacgcagggactgttcgctggtcgctcccgcgggcagctgagacatcgccagcagaaaccctttgtcttccagaggcaggaagctggtcggcaaattattgtacatgtgggcaataaccggaatgacgaacaaaccgcagatggctgtcactcttgctccccgggacagaaccttctgcatcacgcccgcgtatttgtctgcgccccggttgaacatacggttaaaccagctgaagaatcctcggcgggcttgtagtcctccttgttgggccggtttcaaaaggctcgcgcacaatgcgggtgagaatgtgagagccacggcgacggacagagcgactgagatggcaatggtcatcgcaaattgacgataaatgatgccgctggaacctccgaaaaacgccatcggaataaagacagcacagatgacgagacctattccgacgagcgctcccgaaatttgattcatggatttacgcgtggcttcgcgcggggaaagcccttcctcttccatgactcgttccacgttttctacaacgacaatggcatcatccacgagaagaccgatggccagaaccatgccgaacagagtcatcgtattcaatgtgaaacccgccgccgccaaaacagcgaacgtgccgagcagaacaacggggatggccaaagtcggcacaagagtggcccggatactgcccaaaaacaggtacatgacgaaaaagacaaggatcatggcttcaaatagagtcttgatcacttccttgatggaatgctgtacgaatggcgtcgaatccatcgggtaagacaccttgaggctcttcgggaaaaactcggacagttccgcaactttcgccttgatggccgcgacggtttccagcgcattcgctccttccgccggcatgatggctagtccggaagctggtttgccgttgaaacgagctatcgtggaatagctttcactacccagttcaatccgggccacatcgccaagccttacttgggatccatcggcatcggcccgtacgacgatatctttgaactcgtctgctgtatgcagacgtccacgggtagccagtgtaatgtcaaggggctgcccttccatggcaggccgggcaccgagcaaaccgacggatatctgggcattctgtgatttgatggcgtcaatgatctctgaagtagtaagattgtattgaaccagtttgtagggatcaaaccagacgcggatggaatactgggcgccgaatgtcgtgatgttacctacgccttgaatacggctaagcggatctttcagatgactcatgacgtaatcgtcaatctcttctgcggaaagcgaagcgtcatcggaataaaatccaataatgatcaggaagttgccggaggccttcttgacggtgagtccttgattttgtacagcttgaggcaacatggaagtagcgctctgaaccttgttctgcacttgaacctgggcaatgtcggggtcagcctccgaattgaaggtcagggtaatgctcgcattgccggtggaatcgctttccgattcaatatagcgcaggtaatcgagtccggtgagctgttgttcgataacctgaacaacgctgtcttcaacagtttgtgcggaggcgccgggataggttgcttcaatggtgacgctgggaggagcgacgcgagggtattgttcaatgggcatttgcagcagtgagacaagccctattgtcatgacggcaatggcaagcgcccacgcaaagacaggacggtcgatgaaaaaacgggacatcatacagtcaatgcatcaagttaacagtccgtggcatttgatgaatgttccccggagcctttttcctggccggaaacatcgacaacaacaattggcacgccatcggccattttttgcagatgatcgacaatgatcctgtcgcctttgttgagtccggaattgaccagccaccgatttcccatggaacgggatatctcgatgcttttttgttcagcggttccgtttttgcctgcaatataaacatatggttctcctttggtatcacgcatgacaaccgcctgcggaatgagaatggcgttttcctttctggcctctacaatgaaggccttaacgaacatcccaggaagcaggtagttgtccgggttggggaataccgccctgatggtgacggaacttgtattggcgttggtgacggtgtcggtaaatttccatatcccttcctgatcgtagtcggcgccgttttccagggccagagtgactcttgccgtatccgacgaatcggcccggtgaagttcattgctgtgaagagcttgtttaagctgtaccagattagcgctggactgggtcatgtccacataaaccggatcattttgtcgcacagtagccatgagagtggcttcgtccttgcggacataagctccttccgtgatttccgatttccctatttggccacttacaggggctgttacgcgggtataattgagatcgatcaatgctgattccaaatcagcctcggccgacatgacatcggcctggcaggcaagcagggaagccttggcatcttcatactcctgttgactggcgacacggtttccgagcaaggccttgtaacgtttttctttcagttcggcggattccagattagatcgggctttggctagcgccgctttggccctgttggctgccgctctatatgaagcatcgtcgatttgatacaaaagttctccttcttttacgaaggcgccctcttcgaagcagcacttctggacgatgccgtcaacgcgggaacggacctcggcaacgcggagcgaagaaatgcgggcaggaagttcttgcgtgatgacgacttcctctgtgtccaacgtgagtgtcccgacttccagagggctattccgcatggggtcgccagccccatccgctttttcctcggatggagtacagccggtcagcagcatcaaggccacggccaatacggttgccggtgcagacgcgcatgccttggcttgccgttggaaccgggacagaagtgacggcagattgggtggagaatttctcatggctgtaaagtatcgttttgttcgaaaatcgggaatgactttgatattaccgtgttggtaactgcaacttaccagagaaacgaccatggaaatccgccatttaaaatacttcatcacggtggccgaagaattgaatttccgcagggccggagataagctgcatgtcagccatcctgcattaagcaagcagatcagggatctggaagattccataggagtgattctgctcaagcggaatacggcgggcgttcggctgactcctgcgggagaggcttttttggatgatgcaaggaatcttctgctgaaagcagaagagatggtagccagggccagaactatttcggatgagaccaagataattactattggaacaccgggaccatttggaatagctaccctgatggaaacaatatccgccttttgcaaaaaacatcccggactcaaatttgagcttgctgatataccggatattcagcaactggacgcgcttcttcagggaaaaatccagattggttttgtcatagcgcataacgttccttcccatcccaggttcaagacccgacggattttttcatctcccatgaaactttttttaggaaaggagctccccttggctcgcaagagatcattaaccagcaaggatatatccggggaaaccttcctgtatatggggaacagaaaaggcggactgcattatcaggaaatacggaattttcttccggaagacgttctggaaactttgaaattcaggggagttacaaatatggcggaaatgctgttgctggtaggttccggttccggcatgactctgttgcctcgtgaattttcggcaccggtaaggaaccaaattttatataaggaactgtctgacccccgtgagcggttgaattttgaactctgggcggtttggctcaagggaaaacagaatccgcgggtaatggatttagtttccatgttctccggtcaggtatcaaagaaaacttccgtccatttgccaaatggagatgatccttctctttaactgtggatccacagtatctccgggagaaggctgcgccaattctgatttaacttcgtgtctttacctggctcgtaaatactgttcatgcgatcttcctactggcatcagctgaccaagacagctactacgattcatggttccgggtacgacaagttcatgtccactttcccgggacaacgggatatgaagctctttctcatctgaaataacaccttccctcccgtcatatataccagacacagggatttacctgcctgtcatccttcgaagagccgccatggtcccatcccggggcatggcggtttttctgtatccatccatcaacaacgaaagaaccaccatcatggctatcaaactcatcgccaactacagcaaacgactcggactgccgggatattcctcccaccagttcgaggtctccatcgaaaccgaaatcacccacacatccgaactggctgcggaaaccgagcggctctacggctcccttcagactgccgtcgacgcccggatccaacaggtcgggttcgttcctgacgaacattacggctcacaggtcacgcaaaggcctgcccttggggcttcctgctcacagatgatatccacatcatccgtgaaacaaacaccgcctgcaagcgctcccgagacctctgttgcaaccgttcccacatggaagttctcggagaagcaacagtctctcatcctggaactggccgggaaggccgggttggatgactctgccctgaacgaactggcttcccggagattcaacaagtccgttgccatgctcaaccgcatggaagcctccgggttaatcgacgaactgatgaaccgctccggtgcgacatccaaacgttcggcatcaggcaggaacaactacacccgccgtcccgctacgacctatgccggtaactccaacccgtactgacctatgattgctcccgtaacctgtcccatacgttcatcctccctgcacccggctatcgcattggtgaacaaatttccttcggaggcttcttctccttctgccatccgcccggactacctgtctccctcctcggtcaaatcgtatctgtcgtgttctctgcgcttcttcttcgagagggtagcacagatacggaagccgacgacggttgccccgcatgtcggcaaggccatccacgccacactccagtccttcaacctcgcccgatggcgggaagaggacagtagtgagacggccatggaagaagccttctccgcccactttctggagttggagaagacggaaggcccggtggactacgtcgacgaagaaacgagacagaagatacgttcctgtgcctggaatacgatcaaagcctacatggcctccaacgaggttgcttcacaaatgcccctgggagtggaagtcggcttgtctgccgccatccccggcctgccggttcccgtgcgaggcgtcatcgacctcgtccagcgcgacctgacggcagtggactacaaatccgctgccgccaaaccggacaccgggcatgcaaccttcgatcatgaactccagctggtcacttaccagatgatgatcgaagaagccacgggagacactcctccgtcactggatctgatctacctggccaagacgaagacaccgcaagtggtccgagtcaaaatcccgccagccaacgaacagcgaaagcaacgcgccgccgacctgtacaagatcgcctgtgaaggcatcaccaccaaacgtttccatccccagtccgggatgcaatgttcctggtgccagtacaagaaggaatgcttcgggtggtgcaaaggatgaggaaaggcgtttattcagaaacccgtcataatgaggggtttctttttagtcgaggcttattaaacacttagaagtgctttatgcttcacacctataagttttctattggttgagacattacagagcacgggtgtacagagaagcggctgacaggtactggaggattgggatggatgagatgtaagatcattttgttagatgtaacaaaattttaggaaaaggtggtttcttgcaggagatgacgtgttgaatacaaaaatcagcatgcaatatttaaattcattttagtatatttttacttactatttcatggaagttttcggaaatgtaaaccaacaatgttaataaacattctgatctatccaatgattttcttttgatttcattaaataatttggatatgttcttgcattgttcttgaatgctgtcactagtaacaagttcggcttttatcttgttaatcaaatcgtcaaatattttttttcttagcagcgtgagtttgtttctgttcaacttgcagacgttgatggtctcagtatatcgttcgtcagatgatttaatggtgccgttttcttcaaactgcaatttaccaataggggattctagttcgggatttataagtaatggttgttcctggcggtttaattcctcggagagaaggttgattttttttatattttcttcggatgtatcagttggatcgatgtcttggggaagggttgtgcaattggcattcttacaagggaattgatccaacttgcttctattgcaagttggacaggcgagcaataggttgtcccaactgtaggcgagccaatagtatattgattttggcctgaaatgttcgatatggtattcttctacccaaacttcacaataaacacatttgttatagtggattttttcgagagtttccttgatatctttttccttgtaggattcgttgtatcgcgagcctgtgatgtattttttagcggctatatgtttttgacgtttttggtgggttggcagtgagagaagagagctggggatgttattcaggtctttgtcgattttaaacatattttttcaaaatggtgtcaataatttgatctatgtcgttatcagttaagaactttttgcctagtttgcgctgttgtttcagtagatgttccagcttggtattgaggcggtctagcgcatatgtatctgctgtcgtatagtcgtctgttacggggtttaagagagcggtatccagatcaaacagggaagaggtggcaagtgtattgattgttaaacgatttaggtctttccttttaaatgatgggcttatggatgtggtaccttcttctctgaatattcgataaatgattgcttcatctgaagcagcttgaatgattgttgggctgtgtgttgtgaagaaaaattgaatgtttggaaagttgtttctcagctttttgacaagattcatttgccatcttggatggatatgaagttctatttcatcaacaaggactattgcttttttttcgagcaccttggtttcttcgtcatcattatcgtcgtgtacgagtctgtagattaaatcgacaacaaagatgatgatgcttttatagccttcggaaaggcagtcgaatgagattggtgtgtcatgttctttgaattgtggttcgttcccgacccatgttattgtgatatttttttcaagaatgtcagataaaacttcttccaatgatgttgtggaaatcaagctgagtctgtctttatggagagatatatttgtggaagatgcttcatctgattgacccctttccattcctgattgttgatttgtaagggtttttgtgctttcttttccctttaagtcttttaaccaggcttctggcgaaatgagctggatgttgttatcgaaataggagttgaatagtgttctgaatccgtgggggtcggcagtttctacgtctgttctggctcgttgggggccataggcgtatattctcggaaggtatgctttgtttttggtggagtatattcctccctgttcatcattacctgatatttcgaaggatgggtttttcctgaagatgtctaatattctagcaaagtcacctatttcttcctgttgatccaggtagcctttacggaatgcgagaaatagtgccatgagaaggagtgtttttccgtcgccgttttcacccagaaaataaatttctttagaattggagaaatccatcacaatatttttcattgcgatgaattcactgatatttaatttctgtatgtagtttccgggctttgcgctagtgagccatatttggaaaaaattcggttctacattgaagatttcagctattttattttctctacatatttgaggcatattctgctctatttcttcttccgtccatccgcatcgaatgaacctgttgatgatgagctctttgaatagagggcctagttccggattctgaaatactgcagaaaagtcataggggacattcgatgctcggcggtattctgatgaagatgcgcctgattcgactaatgcactgcgcgcgtttgtttgttctttgtacttgattattgtgtttttttcttcatcgcatatgaaaattcctttcatgtccatttcgccggaagaaaattctataaatgcctctatgatttcatgatgggtaaggattaaagccatcataccaaagagcattttttcttgaggatagttataaagcttttcccagaatttcggtatttcgtcatgcgtatttttgatgcccaggaagcttttcaagttgggttggttgatttttattccttcttggccattgagatatgcttcgagaatatctttgcttttgagtacatcaaggacttggacgatggagtattttgtccaggatgtcttaagattgctgaaggagcgagattgtgccatggctgtaggttatgactgtgtgaaggctaggatgtattctttgacataggagccgtatgtgtcggcacttcccattctgctatgcatgtggttcataacgaatactttttgtttgtacttgctgccgaggatagtattggcaatttgttgcaattcttcaatggaaatcatgccgctgttgctgtagctgaggaagaggtgggagttgcgttcgtgtgtacagtggaataaatcccggaatgcttggtggacttgagtttttgtgcagaatggggattggtggcggtcacagcggtaacgagctttgtagcgaatgtccgggtagtcgtatttgacgagggtttcgatggcgtggtagaatctggaatagtggacggcgctgtagggaggatctgcgtaaatgatgcttttgggttcgactattttgagacagtcgatgtagttgaggctggtgaggtggggggtatggagcgggtctgaatcgatggtggtgatgagttcgtgaaattttttctcgaagagtggccatatttgttttgtcctatagatgaggacgtcttgcatgttggcggctgtgatgtctcggtattgagcaaagtggcctgttccctgagatgtgtaggacatggcgtatacgagggctgataggatagcgccatagatgagtgtattgcggtaggtttctgcagctgcccggatggaatcgatccaggcgcattgttcgtagctccaataggtgccggagtagtatttggtgaataggtggaagcctgtgtggatatctgaatggagtagttcacgctgttgctcttccagtctttgcagattgtcgaggtgggtgatttttgaataatcggcaattagttcaggggtgtgtgctgtgaggtcgtttacgtatgagagggctttttcgtggatgttttcgatgactcccagaggggctgatgtttttaggttgtagaggtaggcttgagcgaagatggatgaataggattgtatatcgttgatgtggacgcggtattgatgtttgaaggctgatcctacgagtgctgttcctgcaaaaaggtcgcagaagtagttgctttctactcctgttttttggattgtgtcgatgacgaaggagagaatttcccgcttggagcccatgtattttaggatgtgcgggaggatggggattttcatggcgtggtgaaggattcagacgttactgcagtctgtgaggatttcgtggtatttgggtggcgtgtgggtgttgcttgcttgattatgccttgcggaaatcgtcgagtttgtcaacgtagattcccgtgattcttccttctccgtcgattggagtgatgtctttgtaaagaggattgagggatgagaggacatattttccatcccggagagcaagttgcttgagcattacaccacgcccatctgagtaaacgacaatgtcgccaacgtcgggcatatcaggatcatcccagggacgaatgacggcgatctggtcattactgacaagcggctccatggagtttccgtagacacgaaggccaaaatagtcacttgggtatttttttcgtggtttgactttccacgggatagtgtcgccggccatgaatctgtcagcaacgatgttgccaatgacagggagggcatagtcatcatccttgtatttggcttcattctcaatgtcgtctgtcagtttgagaatgaattcctctgcgagttcggcgaggtttttaccggggttcattttttggtaggcaaggatgtcttcccattcggattttgagaattggagagtgatggtatctactcgctgaaaattgcggccctcgtcttgcggatcttgccctctattcataagcccttgaatgattaagatggccttggctggaacctctcttcctgtagagagccagtcatcaactgttctttttgatgctcctccacactgttttccgagccagaccctatcttttccaatatctttgagccatttttttatgtcttttttcgtaggtttcatgcgttaataatacggacttttccggtattagcaacgcttttttatatctttttaacggtttttttcggtatatttttggactataccgagaagctcggtaattctttctcatgcacacgaaagaacgtatcacgattgacgtgtccgccaaatcggccaagtggctacggatggctgccggagtgagtagagagaagatcgttagttccctctttgcccgcatgacttacgaaatggcccatagcgaacatgagaccgaaaccccgaacccgaagaaagccgtatgaactactttttctccccaagcaccatggcgacgaactcgtcaatgtccatcttgagcttttccgcggcgtgctggattttctccgccgtctcgacggggagtttgacgaggatgttgccaaggtcttcgtcggggtcttcctcaatacgcttcatggcggcacggaggttgcgctctgccttcggagagatggcgcgagaggtaagcaagccgttgatgtatacgacgttgtatcctgattcatcggccaaagttttccggctgattcctttgacttcaagcatttacgtagctcttcacggaattgttcgttcatgtgcctgttatgacaaagtaatatttttttttgcaagaaataaaaaaagtaatctctttgttgataacgttgcgaaaagtaatgaaaataaatcataagttatgaattacaacaatgaacacgatcatagcccacccgaaaccgaagacgcaggaatggctcaagaaggccaccggcctgaaagcgtccgccctcgtagaagtactcctcgaacaggaagaggagaaggttctcaccaaatccgaaaaggaagggaagcctatatgatctactcttctgtcagcaatcgggaaacggcttttttaagcccttccggagtaagtttttgaggaccaataacccaaaagaataggagagacggataatttcggagcggctcatttcaaattggtcggcgacttcgccgatctcttcaattggttttttgtaaatcgaatctggagcgagatcgtcgcggtgttctctttgtcgctatgacacgatcataaattactcgaatgctcctcttactgatagacgagccatgctggtcatgcatcgttgctttgacagggttagtcgatgaagacgccacctccgagcgattccatccacaatccagaatgcaatgtttcagggattagtataggagggagtcttccgaatgtgtaaaaggtaaagggataccgtgaggagccttctttttaatcaccttgaatggagagacactctttttatcaaagatagaaaagaccagtcaaggcatgaagaagatcttccgaagtcaaccctgtcgttgctcccgatcctcgtcgcttacgtaaatgatcaaagataccctgccagtcgggagaggtggcttgatattctctcaggaactctcgaacatcgtcctgaattgcttccggaagatgcaatgcatccgtttcctggacgacatcaaaaagcatgaagaagacatcgttgcgatgctttctgatgttgttccgactactgtcggaaccgtgtgcttctccctgttgccactggtgaaacaggttcagacaagcttttatcttcaggatcatgagaacgggaatggtcggacgaggaatgcctttgtcccggctgatgtgctctctgaagaaatggtagtatgtatcatccagaacgatgcaggagagccccgtatactgatcctgtgcttttactggtacaatccgttgcccgggaaccagatgtagcgcatctcccttgcggctgagaagctccaactgagcaggggctcccgtatcttccggctcggaaaaacgatacaggattttacgggaaactccatcttgttcgaggtcaatccgttcacgtattttgtatcctgaccgattgatatagtcgtggaacgtttccgtaaactggatatccatgtattcaagaatcaggacaatgtccaaatcctccgtccctcgaaaggaaggaatatgatcggagtaccatgctgtacatgccgcgcctccgatgagcgcataggcattactgtactcggcgaagtagtggcagaaatgttctatttttcgaagcatgagaggggcagtttattgagttcctgaatgacgcgatcgtccgatgaatcccgaagggaaaggtaaagcgaaagaggatccacccacttgccacccggctgcatgagtatttccggtggatacatccattgctggatgatggcctgagcctcctcgtgttcggattccggatgatctccgggaagaaagagttcccgaatcgactgtttgcccacagcatatgtagggatgtttccgtcaacaaggagagtctgcctgctcaacgccgactctcccgccaaaggcaatcgtctctgaaatggaagcaaacgaacgtgaagttgtttttgaacagggcttctcagcaagggaagcaccttttcccacaagacattaccaggaagattcatattgaagcgccccctggtggttaccccgtcgtaatgacacagaccatgggtgacgagttcatttttggcattactgagcgacatggccgaataaggtaatctggaacctatttgtcgcagattctggtcgtgaatatcatggaaaagaatatgacgtagcacaaggacttgagccacgggagagagaaattcacgaggttccttttcaatttttttatgctgttcccatgtcttcaagtgaatgtaaaactgcggcatatacgcgtacccgtccatggtcatgaacgggacattagccttgatcatacggctacgctggtaagacggggtccgggtcaggaaaaaaacaacaggaagcttgaaaagagtttccaactgttgaaggttctgcctgtaaagattgggagttgcaacatccatgtccatagcggccaaaaacctgttaccccggcaagaagcgtaggcatattggaaacgcttgatgagggacaaaggcagctttgctccatcaacaagttctatctgaagggactcatggaacagcctgatccagattttttgccaaggttcccacatactcataacagtattatacacacggatatgctcttgtacatataaaatatgtatcattgcattcatatatttacaaagagttgctgacatcctgaaaatcactctcttctcacgtcatatatccctgaggaagtagctttctctgcttcctgcctgtgcccgcctcccggccttgttccgggaggcggcctttttgttgcaacaaaccaatcatcaatgaatatgaatactcatacatccactcgtgaactctatcgcaaccgtgagcagcgcatcgaagtggtcatgatcaacagtcacaacggcagctgctcctaccagctcatggccggtatcttccggctggtgtgtaccaacggtctgattgtcggggcgcgtattgccgcgatcaacattcgtcacatgggtcataccggagaagaggtgatcgccgccagtctccggctggcctctgaaacgccccggatcatggacgacattcaccgcatgcagggagtcgaactaccctacaagcgtcaggtggacttcgttcatgaagcggcacagctgcgaatgggagacgactacgaagacaaaatacgtcccgaagcccttctgtcgccccggcgctggaacgacatcggctttacggcgggaggaccagctaccgtctggcagtgcttcaaccgggttcaggaaaacctgatccggggaggcgttcctttaaaaccgcagacggacggcgtatatcgtcgccgctccctgcgtgcgctcaatggcattgacggaaacacacgcctgaaccgggagctctgggatctggccgacagctataccctgaacaactgatctgaaacgaccatgagaagaaaacaacatctacggttgaaacgtctggggcgggctccgtccctgaccggactggagctgtccattctcctgtaccttcacggcgactttgaacgcagtgacaaggagatcatggcggaatgccatggcatcaagcaggaaagcgtcaggcattccgtccgaggtctggccgggcgggagttcatcatccgcacaaaggaagaggaatttctgcttcggtccgattgctggctgattacctatgccggacggcaggcgctcaggcaatgggtgtccgctgccgctccggttcgtcgatcatcccggacaagaattcccgcatgaggcacgtcatgaacatgaaaggcatcatgatcgccctggtggcgctcgtactgctgtgtctgctgggaccgattgtcgtcggcgtcctgtcggctctggtggccgtagcaccgtacctgctagccgtgctgttgctcatgggcgtcatcgccttcttctgcaagtaactccgacaggaaaggaagagaacgagacatgaagacgatgcccatcatcgcgcaactgcgttccacgagcggatccgatacggacgtatctggaagtggatacggagctattggcccggatcgggaaggcagtgtcgctttgcagcagtcatcagaacgatccatcgctggggctgagcacgctgacgattcacgggccgtccatgacggctctggtgaatctcccggaactgacggaagaacagcagaagtctctggacgacgacgaaagcatcctgctggattcgccgattccggaggcggagctggctacccttgaaagctgcatccggctctgcggtgaagccatcgacattcttgatgtccggtatctgtatgccgtcgcctgcaacaagcacacacgggacatgtatgaggccaatatcggggccgtactgagacatctgctcaagtcccgccatcatcccggaaaggaggtgttgcctgatgctgacgattgaaaagtacaagggcacccgcttctgggccgtctttcaagacggagagctgttggccgtgaccgtgtacaaacgaggggctcaggccattgtcaggacgctggaagccaaggacggataaggcctccattcagcagctcttcttcatcatgaaggagagctgttttttagctgtcagtcatgaaaaatcctttgttttcaatctgaatatcaatgtgttgctttttgcaggcgctgaatttaaaattccttcatgaaacgcgcaatcatcgaaagaatcgccccactggtccctcatcccgatacatggctttccccggatcatgacgactctgttcttcgggttatccctttggcgatggcgaatagaatcaggaggattcagaccttgctgggacgtcccgatgccgggtggatcatcgccaagtcatatgcccgggaagaaatcatgccgccagcctggttcaaggaacagacaatacgcagaacaatcaaactcctcatgggtaaagaaaacaatgccgtcctgatggaagccatcgctctttcaggcgagatggcagcaggggcatgcaatcttattcacgccctcctcctgaatgacggatgtaattacgacgaaatcagtcggatcagcggaattccacaggaggttattcgtgctcacgaagaactcttcttcaacgtcagggatcgccgggatgaacaaacttacctctccggcattgtctaccccaatggaagaatcgacgaactgcgtccagattatttcgacgcagcgggcaacagggaattgcttctccggactggattcaacagtaccgtcaggcagacggccttccttgccgggctgcaaatggccagcccctatgcccagggaaacaatgccgagaaaacagaccggatctgccgggacatgctggagcgggccgccatggcaaccggaatgggcatagccaacagctcccggcatcccctgggtcctgtcatcagacaggtcgccgtcaatgcagcgcatcaggtcaagcccgatggatttggtcaactgatcagcctcggggatacgatgaagcaggagctggaacaacttgcccggaacaaagtggaatccctgaaccgcaacatgaacgacatcccccgggaaccggttcccctcacctccaaccacgaacaataatgaagatgacgaaaatgcagaaaatgaaccagctgcctgtcaatgccgtgatgacgacgaaggaactcaggcagcgaggctttaccaaccaggatctgacccgtgccgggaaagaaggtgttcttgtccattgcgggtacggagtttgggctcgtcacgttcctctctgtctgtatgaagcgctgaaaacattccagaaagaatcgcagagcggccacataggtggacggaccattctgcaccttctgctcggagctcccgaaccggaacgaatacaattgtttgatcgccgggaaacgggaaaatatccagatgtttttaatttttcggggcggattcatacagttccatacagaatattcaacgacgaatacttttttgatgaatgctgcggtatcatcgaacgtgacggactgtactggtctactcccgcccgggcattgcttgagagcattgacatgatcaggaatcttgatgattgccgtatcatcatccgggccatggagcaactggaagaaatggacatggatgatctggggcaggtcctggaatgctgccagagggaaaaggtcaagcgctggttcttctaccttgcctccaaggtgtcgcgggattgggcatgggcttgtacccgggactcggttgtccggaaagccctgtcgaacagcatatattctctgcacacaccgggaatgtacgttcctgatttcaggatcacggtgccggaagagctggaacgggagttcccccgttatatgcctttcgggctttcctgaatgtaaatggaaggttggacggcgttttttaagaaacaccgtccaaccttcagaaatattgctgtctttcttgattattgataatgaataactacagaactccctgaactacgaagggggaacctggataaattcatatttagtatatgaaataatataatagatggtatctcccttgtagtaaacggagtattgtagttattcattcatagcttgttatgtcatatttttccgtttcaacaaccccggagttccttctggaggaggtacaccagaaaggaatcgcaacgatccgtttcttcgatgcgcaagtcacctgggaacaaacgggccatttccttgatgtcgtcgagtttaaccttgcgtgagcgtgtaatctgtccgctgcgtatgggagcctttccattcaaaggccagtttttcttctgagcctccttgtaaatgtatcccagtaatgtacgtagccggtcatggaaggagtctcctgtcaaacggctactgcatgagagaaagtgtctgacaagttcacgaacacaacgagcatggtcgattgttacgacaggttgatccgggtgatctgccacagccaacacaagcaacaagcggtaagctatttccatgattcgcgcctcatgttctacttcagcatgatacgtcacacacagggctttcagattacaaattgcatttagtaccagttctgggttatctactttagcttctacaaaagaaatcgtatccgattcatcaatcattatgggtcgacgggctaaaatatttttgatcagggcgttccatccgttaaggtcggggtccggatttttgtctggttcataggtaacgatttgcccccgttccaggtcccgaaagcttgatgagaccaggcaacgggccatgaaaccggattgaagcattcctttatcccccaggacttgttccctggagtcatattgggttgcccataccagggcaagacatggactgttgacccggtctccagatcgcccgatacggtctgttttgatcgcatcgccgctgaagccggccagatatggtttttctcctgacagattgttaccgccataccccaccatgactttcttgacttgttcacgagcttcggatgaagctgacaataaggattggtctggtgaatcggataatttttggactaaagcctccggggtaatgtcttcaatggtaatatcaccatggcaggcaagccgccgctccagagaatgaattttgagtaacaggtcggctctttcttgcattgcctcttcctgtaaatccggagatggtcgtggcattgagtcccccagtttgcggtattgttcatcgagcctctttttttcccgtttccacagagatttttgtgtcgccagggaatactccctggctgtttctatttctgtgatgacttttctcaggtaatccataggacgcgatttccctactccagagccttcaacaatcagtaaaaacagattggatcggaccctgtttccgttgaattgcagggagtagactttcccgagacatcccgagagcaggccaagaacctgaactcctacaatgttttccggtactcgaaaggcctcgacaacattttgtacggttcttttcagaacttccggcaatagttccgttgggaacgaaatatcgggtcgctgtggttcacagggcggaatgagctgttgcatgatcagatgacctcctttccgatagccgtgaaagaaagaatctccccgatcaaatagttctggtggcttatattggcctctcgaacatcctttttaccgttgggcaatattaaagcgtgaacagaagcggcaatacctgccaggagactcgtcgccttggctttcccttcttctcctgcctcgtctgcatcaaaggccaaaaggacatgcttacctcgaaaatattccgcccgttcaggattaaaactcttcacaccgttaatggagacgatagcagggaactctttttcaggcatgcccgagtgaagaatggcatccatggcagcgatggcatcggtttctccctccgtaataatgcagtgggtagacccagggatggcatgaatgccccacatggttactgtcccgcaaactttcatgaaagggctgtcagtaggaccgggaatggtgtaaggattcccattcatactgaatccaaatcgggtggcccagggttctttcaagcgagctttgaccccgatatactttccattctcgtctgtatagaggaagcaaagccctccttccgggcttaagcctaacgcataccatggcctggcggccatgtacatcagggtttcttcagcaaaaccaagaataagcgccattcgctggaccttgaggtgttctaggaaaatagccatacgaaggctttcacatcccatttcctcaatattggttagaggctgtgtttccttggatatgacagccttaactgcgggttgtaactcaggaattgcggagaaatcgttatccgactgcatactttccttgatgaaatggatgatgtcggaataattctcctgcatcgtccattgcttgtgagcgcacaccaggtcgaaaattgttcctgctgcatcgcaagcaaagcagttgaacagaatagttccgtcctccgtgacgctgaaagagcaggatggattatgatcgttatgaatgggacaacaaacggtctgctgatgccctgggtgattactatagagttcgttgaggtacagactacgccctctttctttatagatgtgagccaaggtagcgttgaatgctgtcaggtctttcttgatgttttgatagtcaataaacattgtgttctttgtggttgcccggcagctgtgatttggtaggatattcgaggatacccatccttggaactccgcctgatcgcagcatgcgcgggcggggtttcttattttgccaattcggtttggcggtcaagccatgcgtggacatccaaaaggcggaaccttttgattccaccacggcggttgttctggaccaaaaagtagggaagtccgcattttacgagttcgtctaccttcttggtcgagatcttcaagtgttgagccagttcggccctatccatgatatgggcaatgccgcccaaatctcgaagttgtctctgtggttttgtcggtgacatgtgcggagaattgaattttctctgcagaatgtcaacacgtcatatactgctaataataagacgtttgcaatgtttatatattgcgtttaattaagaaatagtagggtttattaggccttttacagcgaggaatatcctcgatttctgagcaaaaagtgaacataatgggatgtattaatagaatatgcgtttaattacgtataatgaacattatgaaatacttgtgatgaatatgctgattttgtcatactgtaatctctcaggtagtcacgcgggaatcgacaccacattttctcggtgcttggataggattcgtcctactggcggaggagatcagtgagaagtgctccgaaaacaaccgaacttgcctgcttggaaaagtaccaaaaaatccgatctgataaaatggcacaagcgttataatggaagtaagcagatcaggactattgtagatatcccgaagcatgctctggaactagcatgttgcgcgcttacctcgtccacacacaagccagcccattcccgcatccgtcagggaacgtggagttccccctatatctcctgcacgaggccatgggattgtgatttttttctcagagggattcatttgagtgtgattgtgtaaaaatgtaagaatcttttccatattctccatttgtttcggacgtagagggtaatccatatacactgacattacttccttaattcgatccagaagccacctcaaccctggacgacttatttcatgccatttttgaatataagtccaaggagcaaaccacgggattctctttaagaacgattcagaatcaaatttattaaatacaataaattcctttatggaatattcccatacaggggatataggttttcttggactaagacctttgatcatttgccttatatcttttatctctttatcaagtggctctttgcagtactttaacattagccagaaaagagtgtcagacaaaatatcggaagctatctcgtgttcatgttgtagtttgatcgtctgttgatgtagattttcaagctgcaaccagttattaatagctagatcagcttcatctggctcatatccttcttgatcatatagttgacgtcgatataccgattctgggcgcataccgaacaattctgcatggctccatacatattctagaaaggcattgttccaaccatgacgaggtgaccaaatacccattgaatataaattgtatgcttcgccataccaaaaataaataggatcttgcttgaaaacacttgcatctataaatcgaactttaatatcgtatctgccattatcgcttttatggaaaataaattcaagtgttcctggaggagattttatttcagaaggcaaacggctcggttttttgcttctttgaatacgagtataatgacggcaacagatgtgtacaacaagttgatgtgatgagatagaaggtattgatactttgaggatacgctttcctttttgaggagactgtcgagtcgaagaatcttcgaacttggcttggatgttaaggttatgattataaagcaattcaatcctgccggagctttgccccattaccacatcacattctcttagtcttaatctccctccgccgttctgttctgggcaaggaaataagatcgattctagtgatggccttgtatcgttgtcactcatgaatagcttctattgttgattttggggccgaatagcaaaatagccttctccctccttgtctgttctcgcttggacatagtgcttaagcaaaatctccacgctgttgcccatggctttggcaacaactgaagtattcggttcaatggcacacatgtaggttccgtaagaatgccgtagcccatcttttttccattcaatgcctgcttcttttaacgccatgatatcccggccctgattccattcccgttgctctctcgtatcccccgccagcaggtagcccgattgtttgccttttttctgaagccaccatgtcatccaggcacggaatgcttcattaacggggataagccggtcttggccagtctttgatttaacatgctctattttcaggaaaccgtttccaagggcttgccctatttctctccatgtcaaacgagtcaattctctagggcgaactcccataaatgctgccgttatcaaccagggaatggctttgggacatacaccgatggctgtgtgaagcagggatgagagttcttgtggagcataggattcccgggtaggttcttctgcctgaatagggggaagcaggactatcgggttcctcgcgatataggcccgcttttcgcaccaattcaggaatgtattcagggctgttcggtaatgtttgatggtcgtttgagacggaaggcctccatctctgccaaccacagtatcacgcaggagagattcgacttcttcaagagcttctacggaaccaagttcatcaatgtaaatagcgtcagacaaatccaacgtccttttcgtatcggccaggttgcgcctgcattgcttgacggcggtatcggcctttctggtttcagcttctttttctttataaaggctatattcgtggaacaggtcttcaatcgttcgccgggctatatcctgtttatgttccgcatccatagcgtaccgaatagcctcctccagcgtctgtgatttcttaccttcctgcatgcgcttctcccggtgtctgcgccaaaggcgaattgcttgtctttctgttggagtcagcaaaaattctgcttcttgcctgacgacgatatctgcgaatcgattgtatgcttcaatggcttcatccacagtacgataaaaatgattcttcttcaccccggcaggaagatcccgtttgatctggatataccatgggctcttccttttgggttggtggaggatgtagatgcccggaatctggatttttactcgctcatagatattctgtgcaatgtcacctgttttgtatgacgagacctttcccatgctcattacagtacccaaaacggatcataaaggaatctctttttctgacttttttctgaccattggcaataaattcttacagaataagcgattcggaatgactgttaatcactaggtcgttggttcgagcccaaccgggggagccattaattttctaaccctcacaagttcaactgattgtgagggttgttttttgcccggttcagggtgaaaaaggcggaattcatgcgaaatcggccgtgaatcatagtgaagcatgattttgattccgtcttggcatgaaattggcgtgccggagggcatcatgaaacgctgaaggcgaacttggcaacttgctcaaagcgtgactggcagagccgtattccgccaggcttcctggcttttgaaaaagaaaggccagatatctttccttcaatagggaacagcaggctgcctcgccaatctgaaaaatgcggacgcaggatggcgcttgggaaaaacgttcgtgacgagagaccgggcataacgccgtcatcgcagaatttgtccattcaacgtgacgcccaaggatgtaattgctcctgcatccccaggctcagggccgtgattcccatagcggaacattgatgctgaaaatgatgcggacgctccggaaaagagaaggtggccatgccgtcatgggcgcggaacgtcgggaatggcgttactcgctaaaaagcataggtattttgagaagaagtcgaatggaaataaaattactgaaataattgcagtaaaagcattgacctgctataataattgagtaggttggcgttgttgcaggaaaacagcgaacaatcacctactgcgtattttaaaacatggaaaaacatgatgttatttacttatgcgggcataaaggcgttgcagccctgtttggaaaagcatgggatatccctatcgactgcaagccactaaaagaacttcataaaaagtacatgtcctccgtcaatagtatccgtgccggcgtatttccgcccggcagggaattgacgatgggtgacggaagaaaggctctggaagaattgtgaaaacctacctggacaaaaacgtctatgaagcggccctggagcgcatagcctattgcttccaggagtttgataatgttctggtggccttctcgggcggcaaggacagcggcgtcatgctcaatctgtgctacgattacgccaacgaacatggtctgctggacaagctgaccatgtaccaccttgattatgaggcccagtaccagatgacgaccgagtatgtgacccggacgttcctggaacagttcccaggcattcgtaaaatgtggtactgcgtgccgatcaaggcccagtcggcatgcgccctgggggaaccttactggacgccgtgggacgccgccaaaaaaaaactgtgggtgcgggccatgccggaaaatccctatgtggttcacgaagggaatctggacgttccgttccggcacggcatggtggactacgaattccaggacaaactctcgcgccattttgccaaaaagcgcggcaccaccgccgtcatggtggggctgcgggcggatgaaagcctcaacaggtacgcggccgtggcacgcggcaaaaaaaggagatcctacgagggcaggaagtggattacgcagaccagtgccgtgacggccaacgtttaccctctttacgactggcgcgtcagcgatatttggacggccaccgcccgctttggttttgactacaaccgtctttatgacctcttgtaccaggcgggccttactgccgggcagatgcgggtggcaagcccgttcaacgactgtgcccaggaaagcctgaagctctacaaagtgatcgatccctccaactgggcgcgcatgatcggccgggtcaacggcgtcaattttacgggcctgtacggaggcacgacggccatgggctggaaaaccatcaagctgccgcccggccatacctggaaatcgtattatgaattcctgctttccacgatggatgcgaggacggcggcccactacaacaacatcctggaaaaatccaaaaggtactggatgcaggggggaaccgtcgatcccggaaccgccgatgaagtgctggcggcctacccgctggctgccgtgacgggaaaatcgggccgctacgatggacgcgatatcgttcaattcatgggttatcccgacgacatgcccgtcagcaatttccggcaggtgccctcttacaagcgcatgtgcatctgcatcatgaaaaatgactatttctgcagatatgccggattcagtccaaccaagggagcgattgcccggcgccgtgccgccgtcaacaaataccgcaacatttcatgaaccccccctatcaatcccccgtttatcaaatccggcgcgttccgctggaccaaatccgctccaatgcctataacccgaacagtgtggcgccgcctgaaatgaagctcctctaccagagcatcaaggaggacggctacacgatgccgattgtctgctatcaactggaggacggcacctatgaaatcgttgacggcttccaccgctgccagatcatgaaaacttaccgcgacatctacgaacgggaggatggcatgatgccggtggccgttatcgacaagcctcttggaaaccgcatggcctccactattaggcacaaccgtgcccgtgggtctcacaatatcggactgatgaccagcattatccaggaactgacggaagcgggcatgtcggatgcgtggatactcaaaaacctcggcatggacgcggaggagttgttgcgcctcaagcagctcagcggcattgcggccctgttccgggacggcgaattcagccgggcgtgggaatcgaaataacgtcaacccgggaaaccatgaacaaatatgtcactcaactgctggaagtcatccagaagaaaacgggctgtgacacgagcggcgccgtgcgctggctggcggaacaggccggagtatccgaaagaacagcctggaactggaaacagcaggaaaagttgaggaaggcaacggaaaagaacctcggcagaattgccgaggaattgaagaagtgaacagggttccgtgtttcatcctgctgaatgccgccgggcatccggttccctgctggacgcgcggttttctcaagcggtttcatgggtaactgcatgaaacttcctgttatccttaagccggcagcggaatgcaggcttttccgcgcggagcagtgatgcagtctggcctatcaatgctccggccaggttcggaataggttcaggggttgcggtgtggtgtgccgggaagcgcaatgaacgttctggaacctcatgttccaacggtgctgccatggatgtttgttttcatttgcgaccggacggacggtgcgggaaagactttctccaaagaatgattgcttgttgcaattttttgaattatatcatttttttatgagatggctgctggttttcctgatgagctcttgcatggcttttggtgaaagtatcaggggagttgtgattaacgtgattgacggcgataccattactctcctggaaaaaacgcccgaacagaagcggacctgccggatacggcttgaaggaattgatacgccggaaagggggcaaaacgggtatgaaggagccaaggagtatctggaaaatctgatttggggagagacggttacagtcaagtacagccagcatgacaggtacggccgtattttgggggaagtctggtatggaaaggtgttcgtcaatgaggagttggtgaaggatggatgggcgtggatctataaaaaattttcccccagccggaaactcgcttcccttgaagcggaggccaggaagtccaaaaaaggcctttgggcggagccgaatcccatcccgccgtgggaatggaaagccgcgaagagaagggaagatgccgccggaaagttccttactgaataggttgcccgggaaaacgtctctttccgggtgccgtgatgatgccgaacaaggggttttccaatgaatcaaaggcaattttaatagctgtcgttgttcaagggcggtcctgtttttccttatccggccgggacggttcaaagatggcgggaagcggggttcctgccctggagcctttccagggccacgcttccggatgggtacggaacggcaggaggtagtccgcagctttctggatggaagccccggcggccgttttccggtaacggtagttattatctcccatgcgttccgcaatttgcacgaggtagccccaggcctgaagggtgtaaacactgtattgccatggttccgcccgcttgagttcttccggctgggaaccgtcgggggcaatgtggcggtccatgttggcgaaggcttccgccagccattggcgcgcttcgttgtcgcggcccagaaagtgagccagatgggcgcattgcgccacatagaacaggtaatggttgttgctgcgcgtatgcgcatgcctgccctgcctgctggtggccagccatgcgtagtactggttcagccacgcgtccacccgcttccattcctcttttgtcaaggccccggagcgtttcaacgccgccagggcatccagaaaatcaggcatgcggtaaaggtctatgatgccgcctccgtcgccttccgtccggtgtccggggcggatctgggcgtatttcaggtggggctgcatgcgggttgccggagcaatgaaccaggctctcagccattccccggcacgggaagcggctcgcgggtccctgttgagttcgtactggcgtcccaggctgcaaaccgtaccgataaaagcggccatcttgccgctgtcgtccatgctgcggagctgttggttctttttgccgtcaatgggcttgtaggggccttccggattggcggggtcaggccagtagtagagggcatagctgacgtattcattagcctgcgccttttctccgaacaggctttttttctctccaagggtgatgacgggagcatccagcgggccgccatgcgccgtgggaaggagcagggccgttaaaagaagaaaagacagagtagtgccgccgaaggacatgccttattcaagcaggaactttctgcggggacaaccgggaaatgaaggaatgcgcctaattccttttcaaagccgttccctgccgtttgcgtgatggaaaaaaatggctctgctgacacgggagaggcttttttgtttgagcgaaatatcattttgttaggtataccttataacgaaggagatcatcagagccatgaccagcagccgtgaagattatttgaaagcgatcgccgagctccagcggagcagggagagggtcggcaacaggcatattgctgattatctgggcgtttctgccgcttccgtcagcgagattatccggaagatggagaaggaaggcctggtggagagcatggaaagacgctccatccgcctgacgcggaagggagaggaagccgccatgcagctggtgcgcattcaccggctgtgggaggttttcctggtggaacatctcgggtattcgtggggggacgttcatgaagaggcggagaagctggaacatgcggcttccccccgcttgatggaaaaactggaccgttttctcggttatccggaaatgtgcccccacggaaggaggattccggggagggaggacgggccgctgccggaagggccgctttcccgcctgtccgacatcccggcagggattccggccgtgatcaggcgcgttcccgaatcgaaagagctgctggagcttctcacctccctgggcatccatcttcatgaaacggtagccctgatggaggcggaagcgcacagcggagcgtttctggtgaaggcggaagaaggacagcggctggaattgcctgccgccgccgctgacgccatcctcgtggaagtttctgcatgaacaattaacggaaaggagaaaattaacaatgacattgaaccagttgcctgaaggggagaccgccaggattgagtctctcgggatggaaggccgtttgagacggcggttgatggatataggcatgattcccggcacccgggtggaatgcctggaacgggggccgttcggagaccccgtcgcttttcttgtgcgcggaacggtcatggcgttcaggtcttccgatctgaaaatgattaccgttaagtccgcgtgaaatcagccatggaaggagaacgggtgaggctggacagcggaacggagaagggcggatcttccggcgcggcggaagaacgcatgcccgccgtggccctggcgggcgctcccaacgtgggaaagagcacggtgttcaatgcgctgacggggctgaggcagcataccgggaattggcccggcaagacggtcgtccgcgcggaaggcattgtggggcgtggtccccgggagtaccttttggtggatacgccgggcacgtattccctgctggcctgttcttcggatgaagaggcggcacgggatttcatttgtttcggtgacgcggatgccgtcattgtcgtctgttccgccaccaatctggaacgggatttgaacctggccctccaggtgatggaaacgacgggaaatgtagtggtctgcgtcaatttaatggatgaggcccggcggaagggcatccgcatcgactgcccgcttttggaaaaacgcctgggggttcccgtggttccggcatcggcggcgaaaggtgaaggcctggacgttctggctgatacggtgcagcggatggcgtggtctggagagaggcggccccccctccggctgccctatggggagcacgtggaaccgtggctggcgcgtttggaaatgttggccgggcgtcttccgtggcgcggtttgtcgccccgctgggcagccgtcaagctgctggaaggggacgagggaacgttgcggcttctggagcagtacgcgggaaccggtttgagagaggagaaggaggtgcaggagattctccgtgaggccgccgccgcggaggccggttcttcaggcagttcttttggcgaccgcgtggcggcggtattcgtggaacaggcggaacgcctgtgcaggggagtggtcgctttgccggacggaggggggctggggcgcgacaggcgcatcgacaaggtgctgatggggcggtggacggcttatcccctgatgttcgccctgatggtgctgattttctggatcaccatcgtgggggcgaattatccttcccaatggctggccgacctgcttggaaaaggccaggaggcgctgacggacctgttccgcctggcgcatgctccggaatggctgcacggcgtgctggtgctgggcgtttaccgcgtggtggcgtgggtcgtgtccgtcatgctgccgcccatggccatctttttccccctcttcacgctgctggaggattccggttatctgccccgcgtggcgttcaacatggacaaggtgttccagaagtgctgcggctgcggcaagcaggcgctgaccatgtgcatggggttcggctgcaatgccgcgggcatcaccggatgccggattatcgattccccccgggagcggctcgtagccattttgacgaataatttcgtcccctgcaacggcaggttcccgacgctgattgccctcatgaccatgttttttgcggggacggtggcgtccgggttgcagccgctggcttccgtggcgggcctggtgctgctgatcgggctgggcgtgggaatgacgtttgcgataacggccctcctgtcccatacgattctcaagggaactccgtcttcctttaccctggaactgcccccctaccgcaagccccagatcggccgcgtgatcgtccgctcctttctggacagaaccctggcggtcctgtggcgcgcggtaatggtggcggctccggcgggaatcgtcatctggctgatggcgaatatccgcgttggagactccagcctgcttgtccacggcacgcagtggctggaccccgccgggcggctgatgggtctggacggcgtgatcctgatggcgttcatcctcggcattccggccaatgaaatcgttttccccctcatcatcatgggttacctggcttccgacaacatgatggacatggacgatatgaacgagctgaagtccctcctgaccaataacggttggacctgggtgacggcgttatgcaccatgctgttttccctgatgcactggccgtgttcaacggctcttctcaccgtccgcaaggagacgggcaaatggaagtgggctgttcttgccttcgccattccgacggcctgcggcgtcgtgatgtgccttctggtggcgggaacggcgcgcctgctggggtttgcctgacggatgaatggagttcatgcttccgcggagggatgaaggcggcaaaagtttccctttccgggagtccggaaagggaacgggccatggttccggggttgccgggcaggcagcatgaagccttttcccgggccgcggatttccgtatcaggccagatgcatgccgccggtgacgccgaagacttccgcagtgatgaagctggattcctgggaggcgaggaagacgtacaggccggagagctccacgggctgtccggcccgcttgaggggcgttttctgcccgaattccggcaggtccttctgcaactggcctccggtcacttgcagagccgtccagatggggccgggagctaccacgttcacccggatgcccttggaggctacctgcttggccagggcgcggctgaaggcgatgatggccgctttcgtggaggcatagtccaccaggttcttgccgggctggtaggcctggatggaagaacacgtgatgatgctcgctcccggcttgaggtgcggaagggcttccttggcaatccagaacagggagaaaacattcacttcaaatgtcttggtcaattgctccgtggtaatgtcctgaatgtcctccaccgctacctgcttgccggccaccagggccagaatgtccaggccgccaagtttttccagagcgtccctgacgagtttttgacagaaggcttcatcgctgaggtcgcccggcagcagaacggcgttccgcccttccttcctgatgagctccgccacttcctcggcatcgctctgttcttcgggaaggtagttcagggctacgtcggctccttcgcgtgcatacgcaatggcggccgcacggcctatgcctgaatctccccccgtgaccagggccttccgtccacggagcttgccgcagccatgatagctttgttctccggcgtccggcacgggttccatttcggactggagcccgggagctttctgctgctgtttttcatacccttcctggcggaattcgtcgcgcgggtcctgcatttcgtgaatgtctttagtgctcattttttcatcagtcatgttttggcgtgaaactgccgggagaaggaaggcgccgcccgccatgcgtaagatagctggccgcgtccctttctccggtgttccgcatttcctatccgtgatgaccgggatttggatggcctgttcaagggaagacatgcttttatttcagcatgtcattgatattcacttatataggattattctgaatgttatttccattgatcctgatagagccgttcattcactggtcttccttgaatcctgttgaatttctccaatccgttttcgggaaaagccgctatattgtgctgattaacccgcttgatgatcaaatgatttgatcctttcatcctatttgcgccgagggagggcgggaacctgcctccgtttttcagcgcgtccgcgccggatttcaggacagtccgtaaatgaagtatccgaccactcccgtcagggtcatcagcaggatggggttcattttccatttccgcaggacgaacagggccgcgccgaacaggagaatgctcgggaagtccacttccgcgatggcgtgccagtcaaaggtgctgcagaaggtcagcagcaggatggtgccgcccgcggacatgatcaggcccacggaagccgctttcagcccttccagcaccccggaaacataagcggattttttatgcctttggaagaaaaggtgcagcagcagcgccgccgccacgccgggaatgatgcagcccagggtggccgccacggcgccgggaatgccggcgatttgcagcccgacgaaggtagaggtgttgatggccagagggcctggcgtcatctgggaaatcgtgatgatatcggtaaaaaccttctgggtaatccagccctggtgaatgaccacctggtcccggatcatcgggatgacggcgtagccgcctccgatgctgaacgctccgatctggagaaagacgctgaaaagctgccataatgcctgagtcatccggccctccttcccagcgttttccggacgtgccacaggctcaggaggcagcacacggccagaatggcggcgatgttggcgtgaaagacgaagctggcgaggaacgcgcccggaaccagcgcgttcagcagggcggattttctgcgcaggatcatctgccacatgtccacgactatgtccacaatgagggccgccacgcctgcctgcattccccggaggaccgcttccacggcggtattggaactgaaggcgtcataccagacggtgatgatggacagaatgaccagcggcgggatgatggcgcccaggcagctgcaaatgactccggccatgcctgcggtgcggtgccccgccagcgcggagaggttgacggcaatggctccgggcgtggattgcgcgatggcggccatggagagaagctcctctttggaaaacagccgttttttccagacaaagtatttattgatcatcggcacgacaatgtagccgcccccgaacgtgaatgccccgataaagaggttgatccagaagagccaaaggcattttttcactttttctccggtcatggcgtttaaagaggaaggaatggcgttccgggtattccgcctttgcgggaaattcggcagccgttgtccgggaaaaggcggctgaacgccgcgccgttcccgttttcccggaataaggggtggagggattctatcacaggcggcggtggaaggccatgccattacatggataaaggggagaaaagaggtgaaggtctgccgcttttataagcgggggggaacaattgcggagcctcccgcggcgcgcagcaggcggcggaacaaaaaaagtccggcaggttttaccctgccggatggcaaagaatcaagggagccgggggagaaaaccatccttcccggcttgtttccaggcggaagaaaaaaggaatgcaagaagccggggtcagctttcttcctgttccagctccgctttccgggccaggatttttttcatgacggcgtggcggtctccttccgggatttccacgggattgccgcggtagtcactggtcatggcggccagggcgccccctacatgatgcatgttgaaaatcggcagtttccaggtggagggcttttccgggtcgggaacataggcgaagtcggaagcgggatgttcctccccgtccacttttttcattttgggttcatggtcgcggtccataaggaatggacaaccgtccttgcgggccattgtaaaaaaggccgggataagacgcacaaattcaaccgtccggtgtaaaagcggcttgtcccggcgcatttttattttttatggagccttttgttccagcggtttcaggggagccagcttcaggttcaccatccctcccgtaaaataatagacgggagtttttcttcccggcacgtccaagggagcccttgccattttggattctccaaaaagggtgtcgtccaccttcaatccgaagcgcttgaaggtttccctgtagggggcgagcagtttttcctcccgtaccagcctcacgcagacgctcatgtaatggccgtcctttttggagacacggcttttcccctccctcgccagctgcttgaatttttcctggacgtcctttgcccgccctagggaaggcgtggaaaagcaagtgattttttccagcggcattcccctggcctgctgttcttccaggaattgctccagggccgccaggtaatcctgcagcatgtagtctttgggataagggaaggaactgtcccgtaacacgcaggtagcttctccgccgggatgggtatattccctcagcgtgaatttgaattgaggcgcctttttttcttttccctcattttgaatggaaggggaggttccggagtctgttgtatcagccatggaaaccggcacggccagcagggaaagggagacgagggcaatgggcggggaaggaggaatccgcatggttccttttaaactgataacacatctatcgtcaatactttattgtcctgcgaaaacgtattcccctttcttggaggaatcctccggggctgtccgccttccgtttccgcgttttgctctttacaagagggccgggatagatgagcatgagtccgttaatttataattgttcttatttatggaaaatacataccaccatacccagcttccggagggacgcattcccgccctgcgcgtggaaccgatgcctgcggacaccaatcagagcggggaagtgttcggcggctgggtgatgagccaggtggacctggcgggagccaatacggccatgcgttatgcgttgagccgctacatcgtgacgcgtgcagtcagcagcctgacgtttgaagctcccgtgctggtgggtgatgtggtttccttttatacggagattatcaaggtggggcgcacctccgtcaccgtaaaggtggaggtgtacgcggaacgcctgacgaagctctgcaataatattgccaagattacggaggcggagctggtttacgtggccctgggggcggacaagaagccgattaccctggaagagtcccgcgcccagttcgcgcagtgctgctcccttgaaacaggggacagcgtttcctgttcctgaacagaggcgggagccgcgttcccgcgcgtcaggccgcttttttccgcctgcgggtgatgcccttgtttttatccaccagggcaaagatgaaggagctggccgcggcaatggcgccgatggtgacgaaggtggcgtggaaggcggcttccacagcctttccggaggtggctgaatggccgccgaagctgtccagcagcagggaggccgcggcaatgctgacggcgatggagagctgcatgatggtggagagcagggagttgccgctgctggcgtccgcgttggggaggtcaatcagcgtcagggtgttcatgcaggtgaattgaatggagttggccgcgcccagcagggcgagcatgcccagcagggtgagttcgtgggtgccggggctgatgaagtagaaggcggccagcagtgtcccgatggtaaaggtattgacgaccatgatgttccggtagccgaatttgccgagcaggcgcggcgcgaccgtttttgccagcaggttgctcagcgccaggggaatcagggacatgccggactggagggcggagtaacccagcaccacctggaagaagagcggaatcaggtacggcaggcagcttccccccaggcggcagacgatgttgccggcgatgccgatggcgaagttcctgatgcggaacagggaggggctgaagatgggcgcctttgaacggaacgccagcacccagtacaggagctggaacacgcctccggcggacaggagcagggccatgcgcgtcttgtcggctgcgcctcctgcggtggagaggcccatggtgaccagcacggcggaggaggagaagaggaagaagcccgcccagtcgaatttctgttcccggaccgctttcaggtccggcatcagcttccaggtggcccacaggcctgcgatgcccaccggaatgttgatcaggaagatccagtgccaggaggcgtactggacgatgatgccgcccagcaccggccccaggagaggccccagcagcgccggaatcgtcacgatgttcagaacgttgacgaacatggagcgcggataggagcgcaggacgaccagacgccctacgggcatcaggaaggcccccccgattccctggatgacgcggcacgccgtcatcatggcgacggaggtggagagggcgcacagcagggaccccgcggagaaaacggagatggcgaagagaaaagtgcggcgcgagcccagcttgtcggatatccatccggaggccggtatcaggacgcagacggtaagcatgtaggccgtcaccagggagtgaagctgcagcgggtggctgttgaagctgcgggcgatggtggggatggccgtgttcaggatggtggcatccagcatctgcatgaagaatgccgatgccacaagaaagggcaggtagcgcagcgctttggaggatgtcggcagtttttccatggaagaccgccgccagtatccggctgggccgcgccgggggcaaggcagatgtttgtcccggcgctcccgttgttttccgggcgccccggaaccgccgttatgccctgggctccgttttacggcctgggctgttccggtgcgcgccgcgccagcacgcgtttggaaagccatgcgcgcacaggttcgtcataaagcttcaggcacccgtaggccacggcaatgcagatgaacaggacgcccaccgccaccgggagagcgcgggaaaagggcacttccgcatcgtgcacccaggccaggtacaggtaaacgatggggtagtgggtgatgtaaagggggtaggagatgtttcccaggaaccggctggcccgggaggagatatcgcctgggatgtcgctggctcccagaaagaccaccgcagggaagatgacgatgatgcagaaggcgtcatacaggccgttcagatggaagttttccgccccgcccacgtgcggcatggccagcgctcccaccagaagcaggctgcaccaccagaagccgtgcctgacccggccgggcttgcacaggcggaacaggagcaggccgccgaagaaggggaacatgagccgcgtcaatcccacgcggcactgttccacgtccagcgtccagccgccgatgttgttgccctgcgtgtagcactggtggatgagggcgcaggccgccaggaagaccaggaccgccagccaccggctggtgaatttcctgatgagcacggcgtaaaggatgttggcgatgtattcgaagaagagggaccaggccggaccgttcagcgggtgcatttccgtccatccgcgaatatccagggaaacggggacgggcagcagcgtgaaccccacggtcatgaccagcagcattttccatacgggggtctgtgcgatgttcgggaagatttcagacccctggaagtaaaagagggctccacccagcagcatccccatgaccaccatgggttgaaggcgcaccagccgccgcttgcagaaattccacaggctcatctttccccagcggtcgtcataggcatacccgatgacgaagccggacagcatgaagaagaagtccacggacagatagccgtggttgatgatctggtccgtgtggaattggaagtccctggcacttccttcaaacatgtggaacaggaccaccatgacggcggctacgccgcgcaggccgtccagggcggcataatgaggtttgggagccagaacggagggagagagaggggccggagtgctcatggtataagtacggcgaaaagtgattgtgcttacagaaaaaggggcgatgcgtattttacgtgcgcggccgcggaaccccggaacgggtttttccgcagggaaagtcccggtacaggctggtactgagacggcttgcccggcggacaggcaagccgtttcctatcttccacagacggcgtgagacgtaaagaaaaatgatgaaggctgttccttctccctttttcctttaaagagccggattccggaggaaaagaggcccggcgcctacggcgcgggggcaagtacaatggactttgtttccgcgccgctggtgattcccttgacggtcagggtgcattttcccggcggcagggtaaggacgccgggggagtgctttacgaaccgggaccatccgccggttcccggaaaagtgaattccgtcagcttgtcattgatggaataacccagcttgaacagggtggaggcgggatcggcaatggcataatccgtcgttaccgtataggttcctccgtttttggtgaagatttcccagctgacggagctgaagtgggacaggatgttgaattttcccgcatcttttgccagggcatgcgtgatgaggcagttttcaggcaagagcgtgattttgccgctggccgccggctggactaccgggaagatggagacgggaatgagccggatatagcggatgtaaatgccgtccctcccttttttcttgagcgtaaaggtttgttttcccttaaccaggttcatgcggcccagatggtagattcccccatcggcctcaccgccgccggaagtgggcacattccacaggaagggggcgctgttgccgcatttcagttcatagcgggcggaagcggtagccgtccaggggaacgtgtaccaggcttcaaggatgtattccccgtcttgggcgacgttgatttcccagcttgcgccggagtctttttccgccatgccggcgatgaatttgacggaccgtatttttgccagcttgcttttggaaagttccgcattttcagccttcatcaggacggtcttcccctgaatggcgccggaggctgccgttttaatcagtccgtccgccgggaatttggcctggacggctgcgcagagcaggagggaggcattcagcattaagagcagtttcatgttggatatggatggttggagttgaaagacagatgttaatctattccatcttgtccttcaagacgctgttgccgtcaataaaaaagtgggcaggatttttcgtgccttccctccggatatggttccggaatggcgagagggccggcgattctccggcctccggagggacttaacaagggagtttttacagctgggaagcttgacgctgggccggataattttccggaaatttccagtagtatgttgagaaggaagaaagaggaaaagctgcttgttctccatgcgtcaagagcatttaatcaacgatggccggaataccccctggctgccctgatgattgatgatgcaacgttatttgctgattttcctcctgtccggaatgggcgcgggagcgctgaaagctgaaaaggtcctggacggctttgacgaggaaccttttgaacagcccgtaatcctgcctgaaaaaacgcgcctgtcgcctgtggcggcctatatgggagagccttccgccggcggaacgggaaaagccgtccgtgccgtgcttgctgcaagtggtggaggtggccgcaaacagatggccgggcctgaatggaaaggcgggaacggactggattgccgacgaattgtttttccagttgaacggctgttccattaccctggggaggcagttgttccaggatgcccggcaacccgttctcccagttggttcaaggctgttgttttccggctcccttcccgccgcgctgctccgggacgccctgcttccggggaatacttatgagaatccggaaaaggcgtatgaaatttgccgtgccgctttcaagaacctgaagagagtggaaggcacgcttcccgccgtaccggataccggagctttccgtggaatgcgtgtaccgggttccggccatttacaacgtgcggtggtcgctggagagctgggattatgaagggaatgtgatgcgcgtggtcaggcggcaggtagtggagaaacaggggggtgaaactgtttcctatgacgtgcctgtcctttagcgcggaaaagcggcggcgtcttttccgctcactccgccggggcgcattccctggcgcatgaacttcatgcgccgtccggcatacggatgccggtgcggcggccctgcggggaaaacacggatgggaggccgcgcgcattcccctcacggaagcaggtgccgggtgcgttcagtgtgactggagcgatacgcggttggccagcggcttgccttccaggaagtcccggatgttgtgcagggtgacttccgcaatgttgtgcagggcttccttcgtgaaaaagccctggtgggaggtcaggatgacgttgttgaaggagagcaggcgcgccagggtgtcgtcgtcaatgattcggtcggacttgtcttcgtaaaaatattccccttcctcttcatacacgtccaggccggcggaccccactttttttgatttcaggccgtcaatcagcatttccgtgttaatcagcttgccgcgtcccgtgttgatgatcatcacgccgtccttcattttgccgatggagtccgcattaatcaggtattccgtttccggggtgagggggcagtgcagggaaatgatgtcggaccgggcgtacaggtcgtccagcgtggtgtacgtaatgccggcttcttccgcaaagcgctggtcggggtacggatcgtaggccaggatgttcatgccgaaccccttgaggatgcggatgaggattctggcgattttccccgttccgatgatgccggccgttttcccgttcatgtcaaagcccatcagcccgtgcagggaaaagttgccgtccctggtgcgccagtacgcgcggtgtatcttgcggttcagggagagcatcagggctacggcgtgttccgccaccgcatagggggagtattgggggaccctgacgacgggcaggtccgcttcttccgccgctttcaggtccacgttgttgaatccggcgcagcgcagggccagcagtttgacgccgttttccttcaggctccggatcacttcccggtttgccgtgtcgttgacgaagatgcacgccacgtccgtgccgcgggtcagcggcacgctgtccggggtgaggtgccccttgaagtagcggatgtcgtaatggaattcgcgctcgttgatcgggttgaaggagtcccggtcgtagggcttggcgtcaaaaaacgcaatgcggcaggaatggtcggtcatgcggaagggaggggggttaggcgatcggcggtttttttttcgcgcttccctggctggcgacggcttccatgcgtttgcggatttcttccggatctcccagaaagtagtctttctccaggttcagggaatcgtcaaattcaaacacatagggaatggcggtgggaaggttcagggaaagaagctggtcgttggggatgtttttcaggtacttgatcatgccgcgcagcgtgttgccgtgggccacgatcaggatattgtccagcgtccggagggaggggaggatggttccctcccagtagggaatcatgcggtcaatggcctccttcagggattccgtccgcggaagttcgttatccggcacccccttgtagcgggggtcccacttggggttggcgggatcgtcctccgccaggggagggggcgccacgtcatagctgcgccgccagatcagcacctgctcgtctccgtatttttgggccgtttcacttttgttcaacccctggagcatgccgtagtgcttttcattcagccgccagcttttggcgacgggcagccagtcctggtccagacggtccagcacgcagttaagcgtcttcacggcgcgcttgaggtaggaggtgtaagcctggtcaaaagccatgcccttgtctttcagcaggtcgcccgcatgattcgcttcctctatccccagttccgtcaggtccacatccgtccatccggtgaacctgttttcacggttccacgtgctttctccatggcgcagaagaacaattgttttcatatcgctgaatttagacaggcgccctccggctttcgcgcaaaggaatggaggcgtatgacgtgataatattccccgccgcaggagaaattcctgccgtccggccccggcagtccgccggaggaggggaaggacgcctcacaggtgcggcggcggcgggtaaaattgtgattggcaaccgtcttcaaatggattaacagttcagcatgatgaagcaatatggtttcagttgggctgccgccctgatggccgccggagtgggagcattggcatgggccggtcccggggctgtccggaatgtgcagaagcccgctccttccggtggagctcccgccgtgttcaagttcggcggggaagggaaccaggagttcatgctgaatggaaaaccgttccagatacgcggagcggagatgcatccccagcgcatccccagggagtactggaggcaccgcatcaggactgcccgggccatgggcttgaacaccattgcgttttacgtgttctggaacgaccatgaacagccggacggcagctttgacttcaagacgggcaaccgcgatctgggagagtttctcaagatatgccaggaggaaggcatgtgggttctgttccgccccggtccctatgtgtgcggggaatgggacctgggagggttgccccattatctgctgaaggatcccaaggccaaattgaggactacggaagacgccaaattcatgaaggcgcagacgcggtatctggaagccgtggcccgtgtggcggagccctttttggtcaaaaacggaggccctatcctgatgacccagcttgagaacgaatacgggagctaccagaggaaggaccgcaagtacatggagtggctgaaagcgttctggaccaggaagggcttcggccccttttacacgtccgacggcgcgggggaacatttcctgaaaggggtggtgcttcccggcgtggccgtgggactggacccggggctgaacgacggccactgggaggtggctaataagtgcaatccgggcgttcccgttttttcctcggaaacgtatccgggctggctgcggcactggggggaggggaactgggcccccaccccaggcattgtcaaccacgtccgctggtttatggacaaggggcgctccttcagcctgttcgttttccacggtggcaccaacttcgggtttacggcgggcgccaacaacggggggccgggaaaataccagccggacctgacgagttacgattacggctctcccgtggacgaacagggccggatgaatgaatattacgcccagatgagggaaatcatcctggaaaaactgcctccggaagccgccgtgccggaacctcccgcggacatcccggccatggagattccggagttcacgcccgtggtccatgccggcctttgggagaacctgcccaagcccttccagtccaagttcccgcagccgccctatttcgaacagtggaaccagaaccagggcatcgccgtttacagcgccaccgttccggccggaccgcctgaaacgctggaattcaccaacgtcaatgactatgcccaggtgtacctgaacggagagccggtcggcacgctggaccgacgcctgggacagaagagcgtggagctgccggagcgcaagaagccgggaacgctggaaatcctggtggaggccatgggacatatcaatttccacatcagcatggagagcgaccgcaagggactgcacggccctgtgaagctgggaacgcgcgagttgaagaactggacggtgagggcccttcccctgaaggctgactccattgtccaggcacccaagggaaagggcccttcccggaaacgggaaggagcgcatttccgggccgtcgtgaacattgaagagccgcaggacacgttcctggacatgtcccgctatgccaagggatacgtgtgggtgaacggcgtgaatgtggggcggtattggaatgtggggcctcaattaaggctgtacgttccggcccccttcctgaaaaaaggggagaatgtgattgatgtcctggaccttcacgagaaggagcccaagcccatccgcggcatgaaggagcgcaacaaggagcctggaaagatagataccaaaaacttggacaaccagtggtaaaaccgccgggtcttctgcccgcgtcactggaaaaagcttttttccatgaacccgcgccatggggggagccgcagcctgggtgtcagacgccctgagcctgtctttttctccggaattcctctttgaacgccttccagtccgtgtctctgaccagttccgcgaggttggagtagtaggaccggtggtgcccgaagcgttcgtccatcagctcttcaagcgccttttccggcgtccagccctgcatgacgatgcggtaggcggcgcagacaatgccggtgcggtcggacccgtgccagcagtgcaccagaacgggcttgggcgcgctgctgatgaccagcaggcagtccatgagttcttcccgggtcactttccctgccgccagtttaatgcggtacaggcgcagtccggtatgttccgcctcatcggcgtcgctgtggtattcccgcaggttcaggacggatttgagccccagcttttccagggccttgaacccgtcgccgccgggttgtccggaacggtacagctccgggctgaggcggtagcagtttctggcgtcttttaccttgatgggagcgggggtttccatcaaggtttctgcgcaggcaaggggaagaggcgccgccagaacggcgagtatcacagcgttccggttcatggtttctttcaggaatcggacgggtaaccgacgctctgggcgtacaggacttttttaaagacggggagtttcaagcgccgctggatatagtcggcgtcaatcatggcgcggaagacggtgccgaggcccgcggaagtacagaaaagatagacgttttctccgatgaatcccacgcccgtgcaggccgtgaccagttttcttttggcgtcaaagtctccgggctgtttggactggtccaccacatagaccaggttcagcggcgcggtagccgcgaattcctgcgttcccgtggcggcacgcatatcgccctgaaccactcgctccaactggtgggtttccggcttgtaaagataggcgccctgcggcaggacggcatagatttctatttcgttggaattccgggaggacggcgccgtacggtaatcaggatcgtcccggttgacgccttgagccgcccagagcagggaagacaggatttccatcggaatgggcttgtctgcgaaggatctggtggaatgccgttcattcaggacctgcatgagcggcctgccgccctttttgtccggcggaggcagcacgatgttgtcactgagggccgttccggagaggaggcttcccgaaatgacggccagaagcgggctgagagcatgagaaatattcataggcggcgaaagacggataaagatgatggaataattagcaggatacttgtatttttctcatgtttttgggaacacgtgaaaacctaatcctataaaatggctatgaaaacacaaggaaaaatcccttggtttgattcttaacgggttccggaagatggactcaccggaaaagaccgttgtttcaagttgaccttgggagggtattgcgcttttatgtcaaacggaacagggatggaaatcttttttccttccctgcccaatttgctccaacccgttcaagccttatcccatgaatcctgtcaatcccttgcgtcccggttctcccaagcgtaaaaaatcctcctccgggggaattgtcatgaccattatcctggtgctggctcttgccggcggcggagtggtttaccaccgcatttccgttcaacgggaggcggaggccgcagagctggcggccagaagggacgcggaagcgaaagcggcgcgcgcacggaaggctgcggagctggaggcggcgcgcaaggcggcggaggaacgggcgcgtgcggaggcggcggaaaaagcacggctggaagcggaacgcctggctgcggaagaggccgccagaaaacggcagcagaaggaaccggaggcggtggagccggctcccgcagagccgaaggaagagcccgtggtccgggaggaagacccgcgcctggagattttcaaaaagcccgttttgctggtcagcctgaaggccaataacgccgccaatagaaagctgtttacggacgccttcaatctggccctggagacgggccgctatgacttgtacgccggtttcctgcggtccaatctggaacgtgacgccgtgaaggtcattaaattcggcaaattcgacgtgtccatgtatgaccaaagcccgtatctcatgcgcgccaatgaactgtaccagctcatcagcaaggtgggggcggaaaccattcaggagcagctcaaggagagttcccccagatatttttatccgtggcttttttcagacccctccgaccctctgcggctcttcctgcgcacgatggcgcgggaacagactcccagggaggaatggggaggcatcctgcggaagtgggcggagttctggatgaaaacctccgccatgccccggagcaagtattcctccctggcgctggcctgcgccatgctggacccccgcatcgcctccagtccgtccaggctgcgggcctcttcttccaccaacatttccactactcccctgacgctggaacaggtgttcgagtacttcgtggagatggatgaagcccatgaacttcttacggatattaccaaattaagcccttccgagctgctgttcgtggtggacgtgcgcctgccgaggtcggagatggactgggcgcgcaagaaggtgcgccttacccggaagggctggggcggtgcctattccatgatccgctaccggatggaccgcgccgccctgggcaaggatccttacacgaattacaccttccaggagattctggatgaaggcggcatctgcatggaccaggcctattttgccgtgaataccgccaaatgcaacggcattccctccgcctacgtcaccggggacggcaaccgcggcccgcacgcctggatcaatctgctgacgacggacgaaacctggcagtcctatggcgggtatgggtacaatacggggcatttttcccatccgcacaaccgcaagtcaaagcatgaatccactcttctacagggcatggacaagaaggtgaacggctcccggctggacacctccctggattacctttccctggcggacctgtttgaagagatgcagaagccggattgcgtccgggtgatgctggaagccgccacgcaggccacccccggaagccctctgggctgggaacgcctgatcgcgctgatgagccgtccggaaagcggcacgaagctggaggaatgggatgtgctggtgaccatgatcaagcgcaagttccgctcccggccggattacctggccatggccgcccgcgtggaggatgaatacattttccccatgagggacgcctccaccaacaagcgcaatgtggcccgggacctgaaaaagctggaaaaggagacggacgagggccgcagcgatctgacttccgccgccatcaagcggcaggcggacatcctgatggagaacggggacaaggccggcgtggcttccctgtaccgcaagtccatgaaggattacgcgcgccgcgcggaagtgttcgaggcgctgatggggcagtattaccggtatgtctcccaggagccggaggccgttcttcagctcgccaaggaggcggaatcctcctacaaccgctatatccgaaccaagtcggacgactacttcaaggtgaagaaggaggttgccatccagaggaagatagccggatattatgaaaagggtggcaatgaaaagaaggccgcttccctgcgcaaggacgcggagaagcgggagaagaacagcaagaagggcatccgggaggagggatagcccggcaggccgcctgcggccccacccatcatttccccaggcgcgcggccctggccgcctccggctgcggcatacccgtggaatgaacgtttttaggctggaatgctgtcttatcttcaactaatacatgacctatatggcaagagaaccttacgcgaacttctggcccaaagtggcggataccgcttttgtggcggaaagcgccgacctgatcggagatgtcaccattggagagcacgccagcatctggtaccacaccacgctgcgcgcggacatcaacaagatcgtcattggagattactccaatatccaggataatagctgcatccatctggcggacgacttcggctgctatgtaggcaagtacgtgaccgtgggccacggcgtgattctgcacgcctgcacggtggaggacaactgcctgatcggcatggggtccatcattctggacggcgcggtcatcggccagggatccgtagtgggcgcgggcgcgctgatcaccaagggcaccgtcattccgcccaattccctggtgctggggtcccccgccaaagtggtgaaggacctgggcccggaatccgcggataataaccgcaagtgggcggagaaatacgtcaaggtcgctgcccggtatacggagcgagtcatcaatcccggtttttaacatttgatttccgcacgccatgccggatgaaaagctgatcaccctggaaccgtacgccctgctctatacccgggccggggcaggtgtgtgcctgcgtgatccgctgaccggcaaggcgggcgttatcttcatggagctggcggacggcatggcgctggagcgcagcctgaacggggaacgcccggtgcggccggacacgtcctccctgctgtcccattttttatccgccatggagtgccgggtgaggctggtgctcatcaatggccgcaaggatgaagttttttacgcccgcgtggcggtggaggccgccaacgaggtcatggacaagctggtggagctggacgcccgcccgtcggacgccctgatgattgcggcccagttcgggaccggaatcaagattgttcccgccgtctgggaaagcatggagaacatcctgccccagctggaacagctggacgcggattccccggacagccgcgcgccggtgtatgtgggagagccgtaggaacggcgcttccggctgccggaccttttcccgcctcccgggcacgccatccggcgcggcggcggcttgaggaaccgtcttccggtttgccgcccggaggcatgattgcggcataagattttccggtccttgggcatacctactttttacaaaaaaaacttgctaaggcgccggaatccctatacattcgccgcacatcacttcaagtgggtagattcccgagcggtcaaagggggcagactgtaaatctgttagcattcgctttcgaaggttcgaatccttctctacccaccacttttactttcataacgcgttctccggaagaacgcgttttttattgtttccgcggttgcgggttcgtgatgttcaacgggaaaagggaatcgccgccctgtaggagaagcaggaaacgagcatgcgctcggaggatggggaggcggatgacttgttcagcctatcgacaaggcgcgcaggacatgttagatattctctcttgccgatttttcatctctgccgtttattgacatgttgaccacgctgctcattctgggagtatccgccgttttgttcgtccaggggagaatccgttcagatattgtcgcgctgtgttccctgctgtgcctgatcgtgttcgggattttaagcccggagcaggcgctttccggcttttccaactccatcgtagtcatgatggtggggcttttcgtggtggggggagccattttccggacgggactggccaagatgctgggcggcaggatcatgaagctggccggcaagagcgagctgcgcctgctggtgctgaccatgcttgtcacggcgggtatcggagcgtttgtcagcaatacgggaacggtggcgctgatgctgcccattctggtgagcctggccgcggacggcggcatccagacgagccgcctgcttatgcccatggcgtttgccagcagcatgggcggcatgctgacgctgatcggcacgccccccaacctggtcatcaacaaccagcttcaggaggcgggaatggaggggctgggctttttctcgttcacccccatcggcctcgtctgcatcgtgacgggcgtcctgctgctgattcccctgagcaggaagttcctgggccgtcatgacgacaagacggaacacgaggccaagggcaagtccctcagccagttgatagacgagtaccagatcatcagcaatctttaccgtctccgggtgctggaggattccgccctgacggagaaccccctgcacgacctccagataccggaccgctaccacgtgaacatcgtggaagtgcgccgcaggcattccagtcggcattccttcctgcaaacggtcagccagaccatggcgggctcggacacgcgggtggcgcggggagacgtcatttacgtgatgggggagtttgaggacgtggaccgtttcgcccgggaatacggggcggtgatgattaaccggaagacgtcggaagatacggattccctgctgaaaagcaaattgaagtttgacgagataggcattgcggagatgctgctcatgcgcaactcggacctcatcaacatgcccgtgaagtcttccgggctccgcgccaagtacggggtcaacattctggccatccagcgggacaaccattacattttccacaatttgaaggatgtgaagctccagtacggggatacgctgctgattcagggaacctgggcggatattgcgcgcctgagtgagaaaacctttgaatgggtcgtggtgggccagccgctggcggaggcgtccaaggtgaccctgacgcacaaggccccgctggccgctggcatcatgctgctgatgattgcggccatggtgttcaactgggtgcccgcggtggccgcggtgctgatcgccgccgtcctgatggtgctgtgcggatgcctgcgcaacgtggaggaggcgtaccggacgatcaactgggagagcatcgtgctgattgccgccatgctgccgatgtccgtggcgctggagaagaccggcacctcggaggtcatctcccacggcctggtggccggcctggggggattcgggccgttcgccctgatggcgggcgtttatttcacggcctccctgctgaccatgttcatcagcaatacggccacggcggtgctgctggctcccatcgccctgcaatccgcggtgagcatgggcatcagcccctatccgctgctgctggcggtttccgtgggcaccagcatgtgttttgcctctcccttttccacgccgcccaatgccctggtcatgccggcgggcaagtacacgttcatggattacgtgaaggtaggggttcccctccaggtgatcatggggctggtcatggtggtggtgatccctctgtttttcccgttcgtgaaagcctaggccggagagccgttcacgaggcggaaagggcgcatggcagtgtaatttacatgcattactaaaaaaagagagacaagggaagcgcgtgggagtagaagaggattgtttaagaacccccatttaatgatgaagtacttgcttattattatggccgctgcgttcgccatgccctccatggcggaggaagacgctcccaagagaatgacttccgcggaaaagaaggccgccctccttgaaaagtatgataccaataaggacggcaagctggattccgaggagaagaccaagatgaaggaggacctgaagaagcagaaggaggaggaacgggccaggaagcacgcctcccgcaaatccgattaaggttttacggcttcgttgacaatctgtttttcagacggcttgaaccgggttcaggctggagggagaacgtatgcctgttaaagcgatgagatacggaatttggaccagatgggccgctgcggccgtgtttgcctccctggctgcatgtacggcggaagaatgggcccagtttaacaaggagatggagcagaatcagcgggccgccgccgaacgccgggtcaaataccgcaagatcagggtccagtgctccgactgggagatggcggatacggctgccgcctccctctcgtccaagggattccgggtcatgtaccccggagaagacggctacggagccgtggcgaccgtcagcaagacggcgcaggagcatgtgctgattcgcaacgggaattatttcaccacgctgcccggtcccaatacgcggcccggctacaggacgaaggttaccgtgaccgtgcataatctggcgggcaggaagctggctgaataccagggggaaagcgttccttccgaatccttccaccgcatggaggcggcccggtccgcctgccgcaaggccatcggcaaaatgccgtccagcacttccatttactggtaggggggagttttggcccttatcctggggacggcagccgggctacactccggctccggtcccgcgcctgccgcgtgacctgattttataggccagcgtatccgccagctcccggagggcgttgagcgggtttttccgcaggacgtggcgccctttcagcgtggcgccgggccggacggttcccgttccccggtggttgtggatgacggcggctgtctgggcgaacatgttgtacttttccagcaccaggcgtctagcctcgcgaatggcgggaagccgcttttcgtattccccgccgtccatggccttgcggataatttcaaaggctttttgcggatcgtccagggggatggggatgaagctttcctgcgggaagcattccgtcgccagcgggtccccggcgtaaaagggaagggtcatggcgacgaaggcgtcggacagtttttccgtccagtgatggggttccagatggttttccacgcacagatggtacttgtagccgtccatggcgacggttttgttttctatttcctgaatgccatgcccgaaccagtccagctccggcaggcggtccgccaggtagcgcgtgaggtcataacgcattttatgcatggtatgcgtgtgctgcttggcggaacagatggtggaaagcatcttggttttcggaaattccgtctggtccagaatctcctgcatgggcttgatgtacagccattccaggcatccgcggcccagggtatggttggggtgcgggaggtcccggacggagtgggtagtcagcacggtgccgaactggccggtgtatgcccggctgtagattttaatggaagggggttccaccgtgatcaggatggtctggtccgggggacagagcaggggttccgtttcatccttgatggtgcctatggagttcctggggaattcatcgtatactagtacccagtcatagtccgtcatggcggcgtccgtgcagaacaggcagtcgccccacagcagggattccgttttatccggggaggccttggtggattttctgatgaccttgatgcgtatggggcgggaggaatccgtcatgggaatggaggcgttgaagcggcgcgcgggctttccgccgtacgtcgggcaacccgtccggaagcatcgcggcggcggcgctgcatgacgtcagtgtagggggccttccttccttgtcaatgtcaaaggattgggcgtttttccgtgcggagcttccgtcagttggacaccgtgctttccatccccggaaaaagctggtcgaggatgccggaaaccattttcctggaaccgtagggggaaaggtggttgtcgtcacagtacatcaggtgcccctcgtcttcttccagccaccgcccgtttttatggaaggcgccgtgcagcgggataaagcggcacaggcccgtggattccatgtgctccagcagggcgaatacggggcgctgccgcgtgatgaagtctccgcccagcaggcggtccgcgcggttggcgttcagcagcgcattgcgccgcatgagtttgcgcgggccgaaggtccattcaggcacgggacccagcagcacgatttgcttgccggccttgcgaaggcgtgcgcaggtgtggagcaggccgtccgcaaccagttgtttcaggcgcatgtcccggtggctgttgaccagttcaatccagcggttgtggatgaatacggtgtgtatctggggagtgttttccagccagtccagaatcaggtccatgttgtgctcccagtgcgggtacatcatgcgcagcagcgtgagggaatccgcgtctccggactcggaaatgccgctcagggggcatagccgcgcccggtagaacaggcctgaccggttgaggagccgggcggcgtcgtcaaagcccggagagctggccatggcatggctgtctcccataagcaggaaggaagggggctgcccggttttacccagcagtacaaaggggtagtccgtcacgtctcccagctccggatgatggggctggatggcgtttcccttttccaccaccgcacggtcagggggcgtgatgccgaaggagggcgggaaggccggccccttccagtattccgggaatgatatgttgttggcggccacgtgccagtagtcccgtgcgccgtccgtccatttgagccattctccggcaaaatccagcgtgaggcaccctgccgccgtgagcaggaacgcttttgcgggcttccgccatgcggcggctgtcctgaagggggtttccacgaatttccaggaaaggaaaccgagaagaagggagagaaggaacatgcccgcatagtcccgcggaccgcattcattgaagcagaagtaggtccagtacacgatgacgggccagtgccacaggtacagggagtaggagattttgccgatgcccgtgctgagcggatgcctgaggatgcgcccggaccagccgtggcttccgtagcggatcagaagggccgcccccgcgacggaaggaatggccgtataacccggaaagggcgtggaggaggaataacaggcaaaggggagcagaatgccggcccaccccgccagccgcagccagcgtattccccggccctgttccgtagcggcgggagccagggccaggagacagcctgccaggagttcccaggcgcggcagtgaagcaggtaaaaggccttgttatgctccagattccccatgtggtagacggcggcgaacagggagagcgccagggctccgcagagaacgggcttgacggcgtttttcctgaatttccagagcagccacagggcgagcggaatcgtcaggtagaattgctcctccacgctcagggaccacaggttcagcagcgggttttcttctgcggccgggctgaaatagtttcctgcggtcctgctgaaataaatgttggtgatgaagagggcgcttgacctcacggtgcgccccagggtccgcaggtcgtcgcaggccagcaccacgcacccgaaggccagcacgaccgcaatcaggcagaaataggcgggcatgatgcgcctgattctccggtagtaaaaggaggacagggagaagttcccttccttcaggctgcggacaaggccgctgccgatcaggtagccggagatgacgaagaagatgtccacgcccgtgtaccctcccgggcagatccattcctgcaaatggtacaggacgacggccagcacggcaaaggtgcgcaggccgtcgatgtgcggaaagtaggttccgtgggcggcatttccggcctgatggagggaaggtgaacaaaagttttcagaaaggcatttgttcatgaggcggaaagaaggcaaatacagggatgggggagaaagtgaagaggaagcgagagaagccgggatggagttgaactgtccgggagcctgggtcagtggcgcaggcggttcttcagccgccgccatgccaggcgcagcctgtggccgcgttttaaaaagcgctggtagtaggcaatccatgtgccgtcccccttgcggcgcgcttcttccggagactggtcgaatatccggtagagtttggctgtttcacgttccgtttcttccaggaagagggcttcctgttccagggttttccaggggcgggacatgatttcacaccacaggccgtcgtctttgtccactttcttcacgtaggccgcggcgtcgtccagggtggggaagtcgtggcagttgatgaacgcggcggagttgaattcccttccgatgtccggattgccccagtaaatggggatggtgcccgcaagcatgctggtgacgattttctcgctggtgtagccggggtaccaagcgttttcaaaggcaatggagaatttgtacggctttttcatccggatggaggaggcgtaccagtcttccgaccggtggccgtcgcccggcgtgttgttgaggtggggccccagggagttgacgaaccggacggaggagagcttgtgaaaaatggcgtcccggttgggatgggatttgcggttggcgtaaatgaagttgcagaagcccgttttggaggccaggagggcgcggacgtccaggcctgccttgccgccgtgcacttcctgcaaatggtggcgcaggaaggggagtttgacggtgcggtcgcttccgggcaccgcatccagcccgatgtagtagtcaaacagcatgaagtccggcgcgatggcttcatggcagccgtacatgacggtgatatggccgggggcccgttccagaaaatcgtaaaacgcttcccggttgacgtaaaaccagggggtggcgatcaggtagtcgaagtcggaatcgtcttccaccacgcggtaacggtctttcaggagctggtaaatgccttccctgccgaaatccggagtggactgtaaaaaggagattttaagcgttttcatgggagaaggcgggtcggagtggttgagagtgtatggggcggctctttcttgtcaatgacaaaggcaggggccggccgggcgtgttgggggaaggttgcccggcggttaaacatcagcctttttcacccttcgcgacggtattcccggagcgtttcttcatacagggcggcgtgccgcgcggcaatgacggggtaggaaaacgtttgttcggcgtgttggcggccttcctccgccagggccagcaggagctttccgtcccggatgagccgttcgcagtggcctgccatttgattcaggtctccctggggagccaccagccccgtcctgccgtccaggaccacttccggaactccgcccgtccggaaggtgacggagggggtcttgcaggccatggattccagagctacgttggaaaggacgtcctgaagcgtgggattcaggaagatgtccgccgcgctgtaaagcccggccagcttgttcatgtccgtaatgaagccggcatttgtgctggggaaggggaattccacgttcttttcctggttgccgaagagcagcagatgaaggttcctgtgcccgcgccggtacagttcctccagcaccagggggatgaaatggcctcccttgaccggattgaacaggccggttgcgccgcaggcaatgacaaaggctccggacgggatgcccagggccgcacggatggcctcccggtcttccgccgggcggaagaggtccgtatccacggggttgtaaatctggacaatccttcttccggggaacatgcagcctttttccacttcccttttcagccagagggagggcgtcaccagcgtcagggacggtatgcgggcgaaggagcggcgcttgcgggagaacagccacgccggaaggccgcggaagaggcggggagtgccgagctgggggcaactgccgcggcattcgtcccggaatcggtcgcagtccatggtgcagtggcaccccgcggtgcaggcaaacatgtcgtgcagcgtatagaccagcgggcggcggatgtggctcagccgcgtgaaatccaccgttcggccgcctatccagtgcaggtgcaccaggtcggctttctccatctgggcggtgtcgaaccccatgcccagcacgttcagggagaagggcaggtccctccttctttccggcagcagggcgtcaaatccatgcgccagatggcggcgcagcgcgtccgtagctcttctggcggcggatctgctgatttccaggccgtctattcccttgcgcctcctgagcagaaggacggattccatatcggaaatattccggttcagggcatcattcaaccggtagggagcggagctggccgatacgctgtgggagacttggaatactgtcctgcgttgaggagaagtcacataggggagtatgaggattaggaatccggcgtcaagcctgcaaatctgaaagaaaaacgttttgggaagatttcgcttgccgttattccgtgaaccggcagacgctggccctgatgtcagggaggcttcttctttcaacaagaagcaggggaagctggctcacggaggggccgcggctgtgaaaggatattttgattgacggtgttttgcggcttcggcgcctgggagcggaagatttctggctataatagatataactcattgtatataatagtataaataatattaaatagccgttgctgcgttccggaggcgataggtatcagggccgggaggccgtggctcccgggaggtacgcgaccatgaaagggagatggggagaatgttgatggagcggcaattggaccatcccggaggggggaaaaggagagcttttccgagctgtggcatccttaccggattcctaatccgccctttttggcgggaagaagaagttgcctgcatttttgcagccagcctttttttgcggtccgcgggattcccatgtcgcgcctgtcctggaatggaaaggaggaaagctgttcccagtcctccgcataggtttccgtaccgtccagggcggtgatgccctgcagcttgcacaggatggagaagatgctctggtcataccggttttctacaaagcccggcaggttgggagaggcggagggagaattgtccgccaggtgcagatggtcgtaaaagacatggagccagtcccggatcaggttttccgtgaccgggttctttttcagaaagacgtgccctcccgcaatttgctgggtgtgcgtgacatggacgtcttccccggaaacgccgaagtggcgcaggatgtcccccttggtccatttgtattccggctgcccgttggtgaaaaccagcatgccgcggctgtcccggtccagcatgtccacatattcccggaaacgcttcgctccgttaatgttgatatggcagcctgcatccaggtacaggaggcggtcgccttcctgcatgtcctgcaggacgtggtggatggaccagggtttccaggaccagtacccgaatccccggcaggacggcgtcaggtatttgcccatgcggccggtgaattccgcggaaaggtcatgttccgtgaacagcgtgatctcatcgaaaaaatccagcgcttccgcctgcctgcccagccgttccagggcggccgccatgcgggagtctgcgaatgagagaaagcggttcattggtccggaaggtagggataaggcaatttacagggaaggcggcgatgtgtcaaacggctcttccggcgaggcgtttttcccttgggaaccgttggaatgcgcttgggaaaaatgttccgcgagcattcttttgcaggaataatagcgtcccttctgtccgggaagcagggaacaggccgccagcaggatgcggccccagccgttggatggcggctgcgccgagttcagcaggtccaccagttgcctgtcccggcccggcaggacggagaggaaccgagccccttccgcgttccggtagaacaggtgccaccagtccagcagggactgttgctgaacggcggtcatctggtggaaaagaggatgcttggaaacgaagaaaggcctgattttccgcacgccgtaggcgaacaggccttcattctgccatccgtgttccttccagtagtccacgatgtacagcagacgctggaattcctgcacgcatttgaagtaggtggggtcattgcagcggcgggaaagggaaccgctccgcatgaggcggtagtaatacaggcagtccggaatgaacaggaggcgggaggcgtgggggacggccatcagccggaaggtttcatcctccgcgccggatttcaggttcacattgaagcggaggcggtgggcgtccagcatgcttttccggaacagcttgctccatacgcagatgtccattttcccccagatggagtcccggaagaagctggccggggaggcgtccttttcaaaatgccaggagggcgacctccttctggcctcaatgagccggtccgacgagtcctcgaagacatggttgccgcactccacgatgtccgcatcatgttccagggccgcggaaaaaaggcgggagtacatttccgggtccacgtagtcgtccgggtccgcaaagccgacgtaaaggccccgcgccgcatccagccccgcgttccttgcggcggaaacgcccgcgttctgctggttcagaaggatgattctgccgtccttttccttccagcggagcaggtgcgcccaggtatcgtccatggagccgtcattgatgcagatgatttcaatgttccggagggtctgccgaaccaggctgtccagacagtcgtccacataagcggctacattgtagcagggaacgatgatggaaacgtcgggacgcataagcttataatgtatgtaacggatttacaatccgtggtcaatgataatttttgcaagataaatattaccgaaggtttttaacgttgtcagcatgaaaagaggggatgaaggccggggattccgcgggatgcgcggggattgcgttccaacggttttccgcatggtccggccaggggttggagtatccggattgtaaattcgttgagaatttggagtccgggaacgcctcaaatggcagttgcctagggccgggtggatgtggtacaaaaggccgtacaacttcttcatttattcttctcttatgattattgtcacgggtggggccggcttcatcggctcaaacattgtcgccgctctggaaaaggccggtaaaaaggatcttgtggtggtggatgagctgggctcttccgacaagtggaaaaacatcgccaagagagagctgtgcgccgtgattcctccggaggacatgcttgactacatggaggcgcatgcggaggaaattgaggccgtcattcacatgggggccatttccgccaccacggagacggacgccgatctgatcatccggacgaatttcacgctgagctggcgcctgtgggagttctgcgccctgtacggcaagcagtttatttacgcctcttctgcggccacgtacggggacggctccatggggtttgacgatgactcctccctggagcacgtcaatgccctgcgccccctgaacgcgtatggctggagcaaggccctgtttgaccgcaaggtggcccgggaggtgaaggaagggcggccggttcctccccagtacgccgggctcaagtttttcaacgtgtacggccccaatgaataccacaagggggggcagaagagcgtggtggcccacattttcccccaggtgaaggtgaatgaaacggtgaagctgttcaagtcctaccatcccgactaccgggacggctggcagctccgggacttcgtgtgggtgggtgactgcgtgaacgtggtgctctggctgctggaccatccggaggtgagcggattgttcaatgtggggtccggggaggcgcgctccttctacgatctggcgaaggcggcgttcaatgcgctggggctccaggaaaagatcgcctaccgggagatgcctgaagaactcaagggcaagtaccagtattatacgcaggcggacctttccaggctgcgcgccgccggctatgcagctcccatgacttccctggaggacggcgtgcgccagtacgtgcagaagtatctggacagggaggacagctacgtttaacccgcattcctttttccgcccatgcccgcacagcgcattctgatgatcaagcacggcgcccttggcgacgtggtgcttgccatggggacgatgaagcggctccgggagctccatccggaggcgcatatcaccctgatgaccatggggatgtttgttcccatggcggaacagctcggggtgtttgacgatttcattgtggacaaccgcctgccctaccggaagctgggcgccacgtggggggccatccgttccatcgtgaaagggaattttgacgtggtgtacgacctccaggaatcttcccgcaccaggaagcgttattatcccgccgtgcgcttcctgctggaccatgacatggactgggtggcctgcaattccggggaacggcgaaggctgctgaaaaaaggcggcttccggtttggcagggtggtgaaggagccgttccacctggaacgcgtcctgacggacctctccttcatgcacggggaagggctgcattttgacgagcttccggaacgctacgtgatgatgattccgggctgttcccccagccatccctacaagcgctggcccgtggagaatttttgcgccctggctcggcgcctggcggaaaggggcatttcctccgtcgtgatcggcacccgggcggaggccgcggaggtggaggccattgccgccagctcccccctggccgtcagttttctgggcaagtccaccctgatggatattccccagatggcgctccgttccctggcctgtgtgggcaatgatacggggcctacgcacatgtgcgcctatgccggggtcccggtgaccgctattttctgccaccggacgcgcaagtccgccattacggcccggtgcatttccaacctgatttcccccggctctattgaggaaattacggtggaccaggcgtggtccacgctggagcccttcctgcccccgcaggaagagcttgaacctgcaaaaatggcggccactccgcaggcgtcatgacggctcccgtgaaaatttccgtgctggttccggtttacaatgtggaaccgtatctggcccagtgcctggaaagcatctgcgcacagacgctccgggagctggaagtggtttgcgtggacgacgcttccacggacgggtccctgtccatcctgcgggagtttgcggagcgggaccagcgggtgaaagtggtgcaggccccggaaaacggcggcctttcccgcacccggaacctggcgatgagctatgcgcagggagaatacctggtgctggtggattcagacgactggctggaaacggatttgctggaggagatgtacagccgtgcgaaggcgctggacgccgacaagctggtgtgcgggttccggtattattatgagtccgaccccggaagggaggaccggttcctgccggaggacatcgcgccccccggaaagggatggattccctgtacgccggaaaccatcggtaaaatacaccatggagcgggcggcatgatgatacggcgttccgttgtggaggagcatggcatccggttccccgagggcgttgcctgcgaggacctgtatttccactatgtcgcctttccgcggtgcagaagggtgtgtgtggtcagcagggcggcatacgtttaccgcaagcgcgccgggtccatcaccagcggctttgcgtccggcagttcccttcagtcgctggattacctgacggtggcgcaactggtgctggaagagtggaaacgagccggaatcctggaggaatacaggacgccttttctgaaaatgctggtgatgggcgtgcggaatatccgcaagtacgccccccatgccgtccagaaagaggtcacccggaaagtgtcccgaatgctccgtgaagaaaacctgtaccgtcccggagaggaggattcccgcctgtcccgccgggaagaaaaactgctgaaaacctggctggccggaaaatccggcttggacttttcctattactggaagagaatgcgcaaagcgggcgcccggctgctgcgccgctgacaccacccgaacgatcgaccgatgaagaagaatgaatttgccgtcgtcctggccagtgacaaccggggcatcctgcctttgagcgttaccgtgttttccctgctgagcaccgctgctccggaaaccttttacaagatttacatcctttccgacggcattgacggggagaaccggaacagcattgagcgcctggcggccccgtttgagtgccggttggagttcatagacgtttccggcattctggaggagcacgactttccccatacggaacagtggcccgtgcccgcctggggccgcgtgttcatcccggagttattgaaggaggagcggggcaacatcctgtatctggatattgacgttctggtttgccgggatttgacggagctgttccggacggatatgtccgggaaggcggtgggagtggtgtttgagaatttttccaggcccggttcccatttcaacgaacgcctggagatgccgctgacctgcacggggtatttcaattccggcgtgctgctgatgaatgtggacgtattccgggaaaagaacctggtcagggccgtgctggattatgccgtcagccaccgggacaggctgacctgcccggaccaggacgcgctgaacggcgccctgtgcgagctgaccgtgccgctgcatccgcgctggaactggcatgacggcctgacgcgccgcatcctgaagaacgaccccagggaacggttctggcgaggagtgacgccgcgccaggcggtggaagcggcgctggaaccgggcattctgcattaccagggggtgcacaagccctggcggtataattggcgctatgaaggggaacgttacgaacgcgccatgcgtgaagccgggctgctgcatggcccgctgcccggaagaaccctcccggccatcctgaaaaagcacctttacaggcctgtttaccggatgaccaggaataaaattctcaggcttcaaaagcagtttgagaaggaggatggcacatgctcctgaagccggatgcgggttaatgttcctgttctattctggactggatatcacgtaaaaccgcccggtaatacttctcgtaatccgtacctttcgcgttttttccgggaggcgtgggcgaagaagagcaaacctccacatcaaattcttccagaagggctttcatggctttggcgggctggccgtagaaaacgatgcggttttgaatgcagcgcgccttttttgaatcgcgcagccatcgtgaccggaggttcaggatgtacagcaggtctatttcttccgaagaaagattcagccccatgatgtaaacgttggaaaagaaaaacaggtcaatccatgattcctccagttgaagctgcggcttgcgcagcttttccgggatgcccgctatttcttttttctgtttttggacccagtaagtgtaggttccctttaaatagctgtcaattttaccgatgcagccgcaatagtgctcatacccgtattgaatcgtgaaggaggagggtttttcattataggtgccgtgaatgttccagatgcggagggagcggcgttccttctccatgcagacatggcggcggatgctgtatttggtttccgaattccggcgctggcttgtcttgtaatgctgtgattccaggatctgcaccaggaacgtgtcgtaattggtggtcagatagtcgtctattggaagggcggcaagctggtgtaaaacggagccgggatatttctgcggggtgaactcttccagtttcttcttgagccggtcacgcacatcggaggatactttgcccatgtcggcttccggatgccgtttttgttttttcaggatcaaatactcgtaaatcaggggaaaaggcagataatccccctggtccctgaacgggcaatagatgtcttgcttgcagccttcaccgccgttgcagggagggcagacggtttccttgagcaggtcaatgctgcttgggcttcccagtgtgcggatcaaaccgttgccaaacaggacggcgttctttctgagggtggatttggtattggtggaagtagtcatcatggaaaacagcagaaccattctccatgctggtccatggccgcgaaaaatcaagaaacaaagaaaaatccttttcccgccgccgtctagtccggcatgaaaagggctgccggcgtcagtgcagttccagcagatagatctccggagggcagttgaagcggagggggagcgtgctggttcccacccccttggtaatcagataggtgttgccgccggaaatatgccaggggtaggtgtagggctgggcgtgttccgggctggcttcaaaccacaggagattgaagggaaggcgtatctggccgccgtgggtatggccgctgatgacgatgtccgcgtccccatgggaaagcatgtgatccgcttccggacggtgggaaagcaggaaatggggtatatccggggactggcgcttggggagccgttttttggaattgcgcgaggtgtccagcattccggatagctggagctgcctgccgtccttgaacgtgacaagcgcgctttggtcttccagcaccgtgatgccggcccgggtcagttccttgcgccagttgtcccagccgaaggtgaagtcatggttcccctggatggcgaagacgccgcagggcgctgccagcccccgcagcagccgggcggccgcggcggggctcatgctggcgtttctgctggcgccgcgggcataatcccctaccagcaggatcaagtccggctgaagctgcatgattctccggacgtagcgcagcgccctcacttcatcaaaggccgtgggcatcaggtgaaggtctccggcaatgacgactttaacgggttttccgcggccgttccactgggggacgcggtagtccaccttccggacgaacagaagattgggttctatcaggtacgcccaggtaatgccggctacgccgagcgcgcagacgcccagcagcagggtgccgaaaagccggagtattctgacggagaagggcatggaagggaagcggcttggcagagactataattcctgaggaccgcaggcgagcgatttatgcgtcttgccatttgagaaaggcccgattgcggggagaagcaggcggaaaggcgcccccttgggagattttagcaaatttgattgacgggcgcccgcatggtatgcttttatgctccaagatatttccatatcctttatcacccatcatttaaccacgcatatgaagaagattaccgttatggctcttgccgcttttgcggcgagcatcatggcttcctgctgctgtcaggatcagggtgctccccccctgaccccccttcccaagttcaatgacctgaaccagcccgccgtggatgtggctccggtggtcatgaagtccaagaagtaatcctcttccgggattaggtacgacttttcaagccgcacttggtgattgtccaagtgcggctttttctataaaaatgcggcagaacatatggaagattggaaacattgtcccaaatttgcgcctttggcggacctgttccgcagacatgacagctttgcggtaattgcgcacgtgcatccggacggtgacgccatcggttccacgctggcgctgggggaagccctgaagcagatgggcaagaaggtggtgatgatgaacgaggacggcgtgccttccaatctggcctttatgccgggcgtggaaaatatcatccccacgcccgatgagccggtggacgtggaagtggccgtttccgtggacaacggcgcgttcaagaggctgggcgaacgcagtctgaaggccctggcgggagtgaaggtgtgggcgaacatcgaccaccaccagactaatgaattgttcggggacgtgcaatgcgttctgccggacgagtgcgccacgggtgcggtgctgtattattttttcaagtatctgggcgttcccgttaccccgataatgcgtgacgccctatacgtggccgtcagcacggatacgggttccttccagtaccagatgacgacggcggccgtgatggagctggccgcggatttgatccggatgggcgttgacgtccaggacatcaaccgccagctttaccaggaaaagccctgggtgaagatgcagctgatgcgcgaggctctgaacggcatgaggctgacgccggacggcaggatttgcacgttctgcctgacgaatgaggcgaaggcacggatcggcagccgtccggaggacacggaaggcctgatcgaccttttgcgttccgtgcagggagtctggctggccgcttatctggaggaggcggaggacgatccccgtatccgcatttccctgaggtccaagacccctgaaatatccgtggcggagcttgcctcccgttttggaggcggcggacatgccatggccgccggagtgcgcatcaggggacccattgaagaagtgcgcctcaccatcctgaaggccatgcaggaggaagtggaacgcgtgctccaacagcagatttcatgaacgcttcagattccatgcaagctccctcgggcgtcctgttgattgacaaggcgcaggacatgacctcccacgacgtggtggcgattgcgcgccgctccctggggattaagaagatcggccactgcggcacgctggaccccatggctacggggctgctgatgctggtggtgggaaaggcgaccaagcttcaggacaagctgatgtgcgaacacaaggaatacgccggaaccctcacgctgggagtggagacctcttcccaggacgccatgggggaagtggtggcggagtattccgtggacggcgtgacggaacaggccgtgcgcgaggcgtttgaccggtttgacggcgcttttgagcagattcccccgatggtttccgccattaaaaaggacggcgtcccgctgtacaagctggcccgcaaggggcaggaagttgtgagggagccgcggcccgtggaggtgttcggccatcaaatttcccgcgtggccgttccggaagtggactttaccgttcaatgctccaagggtttttacgtgcgttcctatgcgtatgacatcgggaaggcgctgggctgcggagcgcatttgagcgccctccggcgcatcaggtccggctcttttacgctggagcgcgccgttacggtggacaccctgaaaaccgcccccagggaggagctgttccgggccatgctttccctggaggagctggcggacattctgattgccaggtagcagcatggtcatttaccgggagttcaaggaactgaagggtgtttcttcccccgtgcactgggccatggggatgtttgacgggctgcacctggggcatgccggagtgattgccgcagcggtggaaggcgcggcccgtgacggaggcattgccgccgtgctgacgtttcgcactcatccgctggcccgtgtccgcccggaaagcgtgccgcctgccattatggcggtggatgcggaaaagttcgccctgatggaagagctgggggtgaagatggtgctgacgctggaattttcctcccggctggcttccatgagcccggaggaattcatcagggagctctgcgcctcctgccgcgtggcggagattgccgtgggggaagactggcactttggccgaggccgcgcgggcgatgtggaaaccctgcgccttttgtccggccgctacgggttccgagtgacggccgttccgcccatcctgcgggacggggagcgcgtgagcagcacccggattcgcgaagccgtgcgtgcggcggattttttacaggcggccggcatgctgggccgtccctaccgctggaggggcccggtgattcatggacgccaattgggacgcctgctggactaccccacggccaatatgaagcccggctgcgggttgcagcctcctcatggcgtttacgccgtacgcgcccgggtgaacggggcggaatatgggggcgtcgccaacctgggggtgcgtcccacggtggagggggatgcgggggaactgttgctggaaacgcatttattcggccggccgggggacatttacgggcaggaaatggaagtggagccggtccggttcctgaggccggaggccaaattcccctctttggaagaactgaaaaaccagcttgcccgggacgccgcccatgccgctgaagtgttgaaacggggtgagtaagacacagaaaaccgtaaaatggaggatgacggcttgaccgaaagagcgatcgggggtttgttgttcggacgtcatgttggttgagcagttaaaatcaaaaatccatcgcgccatgattacccgtggcgatgttcaatatgaaggcagtattgaaattcctgccgatttgatggccgctgtggacctgtggcccggagaaaaggtcctcgtggcgtccgtcacgtccggaaaccgtctggaaacgtatgccctgcaggggcctgccggtacggggaacatcatcatgaacggcggcgcggcccatttgatcaagacgggcgaacgggtggttatcatgagctttgccctgtcggacaagcccatcgttcccaagaaaatcgtttgcaacgagcataacgaaatcatttcctagactttacaaaccatctgaattcacacatactccccgcgttcatgaacctttttttagcaaattcacttaatatcagcattcagttactctttgccgttctggtgattgtgtcacttctcctcctgggcgtggtgcttatgcagagacccaagcaggaagggctgggagccgctttcggcgccgccatcacggaccaggccttcggcgcgcggactacggatgtgctgaaaaaagctacggtgtacttcggctccgccttcatgattctttgcctggtgctgggcatgctgatcaaccgccagcacgtcaagagctcggaaagtctgctgagcccggaaatgatgaaggccgccgccaagcaggaagcctccgttcccgccaagacgccggaagaactccagcaggaggagctgcgcaggcgcgccgctgaggcggaagccgcttcttcacaggctccggctcccgctgtgccggaagctcccgctcctgtctctccggaagctcccgctcccgctaattaaaagaatgttctttttaaacgccccggccgtcctccgacagccggggcgtttgcatgccggggtcatgcgccgcatgtttgccgctccggaaacgcgctttgaaattggcggttccggttgttttccgcttgccctgaaccgtaattgcgctactcttggcaaagtatgaaggcaccttttttgaaccgtaaatccaagggattcacgttgattgaattgcttgtggtgatcgccattatcctgacgctggccggcattgccatgacggtggtgaacggcgtgatggaaaaatcacgggttaccacggcgcggagcgattgcaacggtttgcagacagccgttgagaactacatgctggacaacggccgcgttcccgtagcctggagcggacgggaaatggccaagcaggcccgcaaggacggacagtattacatgacgaccgccgtggatgacgacagccgcatcatgagcatcctgaccaactacatggaccgcggggatgaagataggaagctgaatcccaagaaaacggcctatttcaacaccacgaccacggatgtggaaggttctcccggcctgttctttgaaagccgcggccgcgtgggcctgatggacccgtgggaatccccctaccacatcattttgaatgccaatcccgacgaccgcaccccccgcgtccaggtcggttcccgcatggtgaccaagaacgtggccgtttacagcgtcggcaaggacaagcagggcagcacggaggatggccacatcaacaatccggaaatgacggaagacaacgtgacttcctggtaacgcattccgggaccgcctgttgagagacgggaccgatttattttgcggggcttccggcttatggccgcgaggccccgcgatatattcaggcatattgcctccaaaccgtatttttttcttttcaaccactctcaaaaacccctcaataagtcccagacatgaactggttcaaaacagacgacgtacgcattcaagacatcgagcccctgatttcccccgccatcctgatcaaggattatccggcgaccacggaaatcgccaaaatggtggctacgacccgcaagaatgcggagaacatcatttccggccacgacgaccgcctgctggtggtggtggggccgtgctccatccatgatccccaggccgcagtggactatgcctcccgcctgaaggagcagatggcgcgctttgaaaaggatctggtgatcatcatgcgcgtgtattttgaaaaaccccgcaccacggtgggctggaagggcctcatcaatgacccgttcatgaaccatacctttgacattaaccgcggcctccacatggcccgcgggctgttgctgcgcctgggtgacatggggattcccgccgccacggagttcctggacaccatcaccccgcaatatatagcggacctgattacgtggggagccattggcgcgcgcaccacggaaagccaggtgcaccgtgaactggcctccgggctttccatgcccgtgggattcaagaacggcaccagcggcagtctccagattgccgtggacgccatcatttcctcctcctgcccgcactgcttcctttccgtgaccaagcagggtgtttccgccatcgtttccaccacgggcaacaagtcctgccacctgattctgcgcggttcctccctgggcccgaatttcgatgaccaacatgtgaaggaagcagcggaagccttgcagaaggccggcatcaacaaccgcattatggtggactgctcccacggcaacagctgcaaggattaccgcaaacagccggcggtggccgccagcatcgcggaacagatttccgacggttccgaccaggtggtggccgtaatgattgagagcaacatcgtggaaggggcccagccgctgagctccgacctggtgtacggcaagagcatcacggaccagtgcatcggctgggacaccacggtggaagtgctggaaaaccttgccgccgccgtccgcaagcgccgtgccaaacggcaggaagcgtaagtcttccggtgttggcggaagacattcctagtgattaaggaccagggggtacgccttgggtgattgtacccggaagccgtagttccaatcctttatatctggttacttttcattggcccttcggcgtttttgccggagggtcaatggtcgtctccccacaggtaggaatggcgttcggagattgttttgccgtggttgtccttcaggacgagcttccatgcgagaatctccccttttgttttggcttcatccccgatgaattcaaaaacggaattttgcgtgcctccctttctcccggcagggtaggaaatggatttcgtcaggacggctgaacctgtttttccctggcggtacatcatgaccagggtggccgcctgttccgggttcgcatcattccaggtgacgaagtagtattggcccagacgctggaggcgctgttgctgggagacggcgccatgcagcaggtaagtagcctgggagcggtgcatgcctacatcttctgcaggaaccaccgtggttttcaagggaacctcccgcacatgttcaatccgggaaacctgctccgcacaggaaaacaggaccggcagtacggcggcagtgcaaaggggagcaggaaacttcatggagcccattcaatacacatccgccgggggagtcaacacaaaggtgggaaagcttcagcatggaaatgtggtggggcccagaaagaataaaggcgttccaggactggaatggttctgctgatggagtatccaacaagggaaccgcatccatgaacgggaaaggttccggaagcacggagctggcccgtttgactgccccgtgtcccagccgggcgatgacgctgccgcgccgcctttaatacaacggcacgaccagtgaggaacccagagccagccagcagggcagcgtaaggaaggaagccacggtagtggtcagcaggatttgggtgcccaggtcgggatggccgccgaagcgtttggccagaatgaccgggatgacggcggagggaatcgccgcctggatgatgatgacgcgcttgatatagtcgtccaccggcaggaaataggccatcaggagcagcagcgccggagccagtcccaagcgcgtcagcagcccgcagatgatgggtttgggctcccacttcatgttgtgccacaggtctctcatggaacagccgaacaggatcaggcacaggggcgtggcgcagttgccgatcatttcaaaggttttcatgagaggcggctgggctacataggttcccaggccagaccaggcgagtgccaggcccacgatgaccgccagcagggggccgcggaagaagacgcccatgttcaggttgcccggaccgcctgcgatgatgatgacgccgatgctccatacgaccagttcacaccccacgttgtggacgaaaaggacgcccagcgtggggtcattgctggccgtgaacagcatctggataatgggaatgacgaaaaaggcgtagttctgcacccccgccgtcagggtgaaggtgcgcaggcccgtgccgatgcgcatgcgcagcattttggcgaccagccatgcggacgcgatgcccagcagaagttccagcgctccggctgcaatagcctggagggaaaaggaaacgctgctgagcgtttcattcccggagagcaccatgtacttcatgatgctgtggaagacgaggcagggataggccacatccatcgcgatgcgcatgatgggcgcgtcatggtccgcctggatgacctgcttgtggcgcagatagaaacccgtggcgaagaaaagataaacgggaatggtggagaggaaggaagtgaggatgatggaaccggtgtccatggcggcaggattgcagggcgcgattgattaaggcaaataaaaaaacggaacaggttatgtgttttcccgcgtccggagcaggaaatgcgacaggtccctgatgctgaaaaatacttttgaagggttggcttcttccaggccgcggatgtccgcggtagttccccaggcggcggacaggcaggtcacgcccgctttcctgcaggcggttacatccgataccgcatccccgacgtaataaaattcatcctttgccaggtggcagtcatgcagcagttccccaatggcttccgccttgttcggcctgtcttccgcaccggtcttgacagagcagaacagatcctgcatgccgaattgttcaagcgtgatgcggcagctcttttctccttttccggtaatcagggcaaccaatattccctcctttttcaaggtgttgatcaattcgcgaatgccttcatacggtttcgggcattcttcatgcatcttttcataaaccgggtaaaaatcatgaagggcttcctgccatttttccccggcgaccattttaatcattcctacttcattcaggccgaaggtctgcgtaatttcccgttcgctcagcgtacggcccgcgtagggggaaactgctttttcaaacgcccggatgcacatggggaccgtctcccctatcgtcccgtccaggtcaaaagcgatcagtttaatcattgttcgcgattcccgttgattttacggataaccctgcaggggtttcccgccgccaggctgtcggggggaatgtttttggtgaccacgcttccggcgccgatgacgctgccttttccgatcgtgattcccggcaggatgatgacgccgccgccaatccagcagccgtcttctatcgtcaccggaagggcgaaggtatggcgaatgtattccatgccctccgccgtttccacgggagtgaggcgctcattcagctcaatggggtgcgtagcggtgtaaatctgcacattgggagcgatgagcacattgctgccgatggtgatcctgttgcagtccacgaacgtgcagcccgtattgacggtgacgttgttcccgatgtggatgttgcgcccgtagtcgcaggtgaaggaatgaccgatggatactttggcgccgatgctgcccagcatttccttcaacacctggcgcttttcctccttatggtcgtaaggcagggaattgtacttcatcaggagccggtgggtcttgctcttgaattccagaaacaccgggtcatggcagtcataccattcgcccgccatgcatttttccagttcagtcattgtctttttccctttgttgttgattatggactgtggcagccattctgccgagcgatcgtgaatgaatgctcattttgcagggtatgcagatgctttcaagctaaatgacatgggatacttgtccctgttgcagctatacgcatatagccctttctttgaagaagaagcctgcatatttccagaatcataaaagttttcagcatgttcattaaaatattcaatgtgcagaccggccctcgtcaatgaattaataatatccgaaaccgtatgcatccagaaataggattttacgccatctttcggttcacaggcgtatccgccgatggaactatccacagagggaattttactgaaataggggtatttaatctcgaaaacttccttgtccagtttgctctcatcaaaggaaagaaaaaatgggtgtgaatcaaatacatacaaatagccgttatcctttaaaaggctgcgaatggtattcgcccatacattcaaatcgggaagccatcccaatactccctccgaggtaaagacaatatcgtatttttcaccatgaacttttgataaagtcatgatgtcggcttcaatgaattttacgtttttaaaattaagatcgccggcaagtttatttgcaaaaaatatgttgtcaggaactaaatctaccccgaccacgcttttagctgttttggcaagtatcaatgtatctgcaccggtattacactgtaaatggattatttccttgcctgatatgtcacccagttcttcctgtatataatagttcaagtgaagattatcatcacttagtaaagctttaaagtgatgataatgctcttctgatattttaccccaagcctgcttgttagattcaatttcaatcatgcaatattgccttcttgttattataaataccttttttactcctccatcgcaggaagtgatatacgatgctattctgcaaattaccagcagggagcagcggtgcaccgccccttgccattggcaaggaacggtgcctgcgctttgtggcaaacaaaaggttaaggataaactaaactttaacctcgctgggtttatcctctcgccatgcaatagagatcgaaagacctgtattcatgggactttacagcctcccttttaggagcggtatagtattactcccactcaatggaggccgggggcttggtggaaatatcgtaaaggacgcggttgatgcccttcacttcattgaggatgcggttgctggtttcacgcagcagggccgggggcagttctacccagtccgccgtcatggcgtcttccgacacgatggcgcgcaggttggtggcccattcataggaacgttcatctcccttcacgcccaccgttttcaccgggatgaggccagcgtaggcctgccagaccttttcataccagccgtatttcttcaggttgccgatgaagatggcgtcacactcccggatgatgtccaggcggtccctggtgactacgccggggcagcgcacggccaggccggggccggggaaggggtggcgccacaggatgtcgtgcgggatgcccatggaggcgcccagttcgcgcacctcgtccttgaacaattccgctaggggttccagcaccttcccctgcgcctggagttccagcacgcgctccacgcggttgtggtgtgtcttgatgacggaggccttggacttggcgttggaggcgctttcaatcacgtccggataaagggtgccctgggcgagcatttccgcgtctcccacagcgtcccagaatacgtcgatgaacaggccgccgatgatgcggcgcttcttttccgggtcgccttccccggccagggccgtcaggaagcgttcggaagcgtccaccgtttcaatttccacgttcatgcgggcgaaattggcgcgtacctcatcggcctcattcttgcgaagcagaccgttgtccacgaaaatggcgcgcatgttcacgcctgcctcatgcagcaggacggccagcacggtgctgtccacgccgccggagacgccgcagaccacctgcttgttgcccacgcgttcccggatttcccggatgagctgccttttgaagtcgccgatatcgaatttcttgaggttggcggcgcaggagaggaagttgcgcaggatggtgcgcccttcatgggaatgggtcacttccggatggaactggatgccgaaagttgcttctccccactggagggagacggggacgccttctgcgttgcgggcgatcacctggcagccttccgccaggtggtccaccgtatccgaatggctcatccatacctgggaggagggggacatgtcccggtacaggcccgtgcaggcttccggaagcagggcggcggggccgtattcccgcttgttgctggccttgacggaaccgccgtgcttgatgttcagcaattgcatgccgtagcacacgcccaggacggggacgttcaggcttttgagccattcaaagtcaatatccggggcgtctgcgtccgtggtgcttttggggcctccggaaaggatgacggcgccgggttcgtgaatctggtccaggtcttccagcgcgtacagtttggccatgtagcccagttcgcgcacgcggcgcacaatgagctgggtgtattgggagccgaagtcaatgacggctacgaggtgcttgtcgtccatgtgagagagggtttaacaggaatagttgatgggttcttccgtgatggtgatgtcgtggggatggctttccttcaggccgccggaggtgatttggacgaaccgggccttgtcccggagctccgtcaggctgtgtgcgcccaggtagcccatgccggaacgcaggccgcccatgagctggaagaccacgtccgccagcatgcccttgtacggaacgcgcgcttccacgccttccgcaacgagcttgccggagctgttctgcccgtagcggtcgccggagccgcggcgcatcgcgcccagggaacccatgccgcggtactgcttgaagtggcggccctgatagtggaccaccttgccggggctttcttccgtgccggccagcaggccgcccagcatcaccaggtcagcgccggcggccagggctttcacgatgtccccggaatagcggatgccgccgtctgcaatgacggtgacgcccgcgggacgcgctacggaggctacctcctgaatggcggtgaactggggcatccccacgccggaaatgacgcgggtggtgcagatggagccggggcccacgcccaccttgatggcctgcacgcccgccttgatgaggtcggaggctccttccgccgtcaccacgttgccggccacgatggggcggtccgtcagcttgcggaggttggaaaccacgtccatgacgcgggtggtgtggccggtggcagcgtcaatgaacagggcgtccgctccggcggaaaccagcgccttggcgcggtccaggtaatcagggcccacgcccacggcggcgccgcagcgcaggtggccgtgctcgtctttggaagcgtctgcaaacatggcgcgcttctggatgtccgtttccgtgatgaggccggccagcacgccgttttcatccaccaggggaagcttttcaatgcggtgggtgtaaagaatgtggcgcgcttcctcaatggtggtggtgggagccgccgtaaccaggcgggaaaggggggtcattacgtccttgacccggatgttctggtaatcgtccacgccgcgcatgtcgcgtccggtgacgatgccttccagcctgcggttggcgtccaccacggggaagccggagtaaccctggtccatcatgatctgatggacttcttccagcgtcatgtccttgttcaccgtgacggggttcgggatgaccgcgttttcaaaacgcttcacgcgggaaaccatggccgcctggatgtcgatgggattattgcggtgaatgacggccaggccgccttcccgtgccagggcaatcgccagttccgattcggaaacggtatccatggctgcggacagcacgggaattttcatgtcaaaaccgggaacaagctgggaactgatgtccgcatcaccgggaagaatcgcgctcaggcggggcagcaggagcacgtcatcaaaacttaatccaagagggagatctgccatgcgataatctacagccagacaccctctgacgcaagccgaaacacaggggaatcttattttggggcggcacggcggcgttctgcgctttgctccctgcgttgtcccggcgtgtgtctgttttccgtacaggaaactcttccctcttgatccggggaaacgtcttgcctatcctgaaaaaaagaaatgcctttcatgaatgcttccgaaccctaccgagtcctgtttgtctgcctgggcaacatctgccgttctcctgcggcggaaatcatttttaagaagatggtgaaggaacaaggtttggaaagcctgattgaaagcgattccgccggcatgatcggctatcatcgcggctgtcctccggatgccaggatggtccaggccctggaaaaatacggttatcagaatccgggagtcaaatcacgccccgtgcggaaggatgatctggagcagttcgacctggttgtgggaatggaccgggagaatctgcgggatttgaaacagctggataaaagagggcaatgggaaggaaagattgttcccatgtgctttttcaccacccgttttctggatgaggaagtgccggatccctactatggagggcaggaaggctttgaccatgtggtggaattgctccaggacggctgcgccaaccttttagagaacttgaaggagcagctctcctgaatgataaaaatgtatcgagggaaggttattcttccctttcgtctcaagcgattcccgtgctgtgttctgctgggaaaggaccggtttatgcccggaatgaggattggtcattattccgggcgatgggaagtcagccggtattcaatgaagcttcctcagtagtggggaaaatcccctctttctcatgggaaagaagtagtttggctgccagagtgaatgaaatggcagatattcttatggcccctggatagcgtctattccgttttgggcgtgttgaagagtaaaaattagttggcataggtaatgaattgataaagttattgctggcattcccgtgttggaatcaatcaatgattgataatcaatgattaatctatttcaaccatgaaagaacaatttaacgacgatatcaattccctgacaggagcgcgcagttccgacagcggaggaaaaccgacgcccatcgatgaaagcgctccggatgcttttgaccggaattggaattgggaatttgaggtgcgcccgctggggccttctgaaacggccaaatgctttgtcaccatgggcgccgatgatttggcgacgctgacggtggatcaaaaggagatcatgaacctcggtccgcgcgggccggaaggaggcggtacctatgatccgaaggaaacctcatttgacatcgagggagggaagcatgaggctcatttggaatatcaaaacattaccctcaaagaccataagaagaatgttgccaagcttacctttgatatgaacgtggtcgtcactgaccatcagactggttcttcctcttcctatgtccctccggatacgcaaacggaaccggtggacaatgacgacgaaggcgaagacgatccatgcggttccagcagcggagggagcagcagttctcccaacagcagctccagcaatccatgtccggacggcaacaatgggggagatgaagacggtgatgagccggtgggcaatccttcctcttcagacggatgcatggataacacgggaggagcggaaccccctcccacagctcgcagcaggttttcttccgcctccctgtacggcagcatttcttccgccggtaagcgcgtaaccactcagaccaggaaaaccagcatggtgtggcgcaccaatttcggagctttccgggggatggaaggaatgccttatggcatgctggaaattgtagcttacaacttttcttccaaattatggacgcccgccgctcttcaatacctgcacccgatggcaagcagtatccagccgcctcccggaggcagcttgagagcggacacggcttttcagatcaggaatgggggtaccaatgtcaattattactgctatgctggcgcggccagtgcaggctccataggcgggtccaagaaacggggtggctccgtttccatgacttacgcccaagagagcagccgtactgccaatgcagcttctcttttttctacggaaatgcgcgtgagcaataacaggggaaattccgttttgtacggaggggcttcactctcttccctaaagaacgctaccgggtatgtttccaagcttggttcttcctatacggcgcaggatttttcccaatatctggacatcgtgcgggggagtgacggaaacatccgccagatatggaacctgtgggatggccttgccagcattgaacatgtgacggctgacggctatgtgattgccttttatctgccggagcaggtgggggaaaaagcgaatggcgtttatcccgtcacgggtactccgtttaagactttctccatttccggagatacggcaaccagcaaactcacggtcacggaacaggctgaaggccgttccccatatgtcacccgttattggcagggaacgggaggcgcctggtgcatgtcccagggtgaagaagaagacgccatttacaccctgcgggaaaaacagactgtcacttccaccacatggaaattgatcactaccgttcagcgcggagaaacaggaacacccatttctcgcgtgtgtgaaacttatgaacagacctccaaggggaacctttgcaccagccgaattgaagcctacggcactgattatgcccgggaaaccacttacgattataacagcataggaaaactgtcacgggaaactgctcccgacgggagtgtcaagacgtgggcctacgacgcttttggtcgtgaaacagttcgcatggaaccctggtccggaggggaaagaaaaggcacctacacctattaccggtactcggaccgtccggatccggatatcatccaccaatatgtcgttcttaccatcaaagctgtacggttaagggacacgcactacacctatgaggaagccaatgatgtgcgccgtgtgaccaagcggacggctgccctgggtgcggaaggagagcaagtggaaataacggaaacatggatgccctcagcttccaatgtccatgcaaggggccggttgaagatgcggcaggccgtcaatggggtacagacctcttacgagtatgaagcagacagtcaatacggcgccctgtacaggattacggcggaaacccgggttgggggagaagctgtgccggggcagagcaagcgcaaattgacttacgtgtccgcacagggcaccaacacccggatagaaaaatacgcttttctgatggatggaacctgggcattgacagatacggcggactacgaatatgacaaggagaggcgatggatcaagcgcacgcgcggcaacggacgcgtgacggaacgtgaaatgatgtgttgcggccccttgtgggaaaaggatgaagacggagtgatgactacgtatgcctacaacacggcccgccagcttgtggaaaccattcgttcggctacggaaactactccggagaccattgtcagctacacgcgggacgcttttggcagagccctggcgatacggcgggacgtcggtcccatggcaaccagtgaagggcgggaatacaacctgctggggcagcttgttcgtgaaacggacgtgcttgggagagaccatgcctatgcctatagtgagaatggattgacgaaaaccgctaccacgccggcaggagccacgcttgtcacccgccgccatgcggatggaaccattttggaacaaagcggaacgggacagaggcatttgctttatcaaacggaatgcacggaagaagggattctccattccacccttataccgcaggaagccggggaaccggtccttatggaacaatctgtaacggatggctggggcaacgtagtccgtctttcccgggccaatgccagcggcggcctcatccatgaacgatacagttttgatacaaagaacaggctgttgcggaaagggacggacggcatggctccgatgctctacgactatgactccttcggcaacgtggtgaaagagacctggaagttggcggaagaacctgctccggctaactcccatataacagaatactcctatgcctgtgaacggagggaagacggcatataccgtgtgaagactgtggtgaattacaatagttacgggctgccttactcgaaaagcacggcgagactggtctctttcctgtctccagtcgttgctgaaaagatcatctcttcggatacgagaggcaatgaaattccggaatggatggaatatacggctcccggcaaacgtacaatcaggaaacaggttcctgattccatagtcattgcagaagtgcttgtcattgatgggtatgaagtctccaaaaaggatttcgcaaacatgactacgactgcggcgcgttcctacacggccacggggaaaaaggaaatccttacggacacgcgcggcaatgaaaccacgatcatgtttgatcttgccgggcgcgaaaccgggagaacagacgctgccggcaatacggttacgactgtctatgatccggtgacggcattgccctcctgcatcacggacgcactggggaaaacggcttgctatgcttacgatttgcgcggacgcaagactgctgaatatggtacggcagcgcagccctctgtttttgcttacgacgatgcggacaggttggtagaactcaagactttccgggctccggaagaaaccatagcaggtgatccgcgtgaacggacggatggcgataccaccgtgtggagctatgatgaaggctccggcctcatgacggcaaaaacctatgctgacgggcatggggaaacctattcctatgacgggtggaacaggctggtggccaaatcacaagcccggacggttgatgaacaggggactcatcttatgacgacttacggctatgatgagttgacgggaaatttgctctctgtcactcacaatgatgccacgccggccataggctacacatataaccatctcaatctccttacacaggtaacggatgattacggtacgcgcacgttttcctataaccaatacaatgaagcggtacaggaaaatacggcaggtctggtggccagccggcttgactatcaaagggacagtctgggacgatttcctggctatagtttgcaatacaaagatgatgttgtttttcaaaccatttggaattatgatatgtacaaacgccttggcactgtttccctcaggcatgcaggcgaccggtttacctacggctatcatgcagttcatggacttttggaaacgctcacctatcccaacgccctcaagagatggtatgcccgggaggaaaaacgtgacttgctgactaaaatagcctaccagcgtccggggagtaccgactatttagctaaagtcgactatacttacgatgcactggggcgccccctggaaaagaaggattactttaatactcccaatcccgatcttactcatgtttacacgtataatgaccgggacgaactggttgccgacgtgatgaaccggggcggaacgtacagctactcctatgacaatatcggtaaccggttgacctcacaggaaggagcggaagcggctcccaccgtttatttgtcaaataatctcaaccagtacatttccggtgatcgggaaccctcacaggaagaaacgggagaagttacaatcgtctatgagacaaatagtctcaaccaatacacttccattatcggcggagaagaaagtcctttgatacgggagtacgacgaagacggcaaccagattaaggtaaaaacctctacaggcgagtgggaggtaaagtataacgccttgaatcaggcggtcagattcacgcaggatgccaagcgggtggaatgccgttacgactacctgaacaggagagtggaaaaaacagtctatgaaggagaaatgctggtgtcccggaaacggtttatttactgtggttttctccaacttgcggaactggatgcagccaatgcaacggaaacggtgcaacccgttcttcggaaaacctatctatgggatcctatggagtccacggcaacacgaatcctggcaataaccacattcgacgaaacgggtacctatgtggaaaaccttttttatacgcatgatctgttgaaaaatactacaggcctatttgatacccagggagaatgccgcgccctgtatgaatacggcccatacggcaatgttctcaggatggaaggcaatatggcgaaggataatcccttccgtttctccagtgaatatgcggatgatgaattaggtctggtatattataattacagatattataatattttaaacggtagatggttgaatagggagcccattggagaggatggtaatttcaatttatatagaatggtttataataatcttttcacgtttatcgattatactgggagtatcccagtgaaaacaccggatgctgcgatgaccaactctccttcttatctcgcggatatagcaagagcgactcgaggcattacatcatcatctaatatatctcgaagagctgcaagagttgcggctgcggctgttgtcatcgctacccggaaaggctgtaaaccctgtaagcccccggctggatcgaaacggcatgacattgccaaaccaggatccagagaaagaggagctcacaagtgtgatactgtaggtcacgttaaagtatggacgatgaatcaggctccatttccatcatgcatatgcaattggaatggtcctgttactttggaaaacacacaaactccaccagaaggaagtgccccggatggccctcccccctcctaatcccgctggtggcggaggccctttataatatagaacaaaaataattctatgcaaaaaactatttattatcccgaaggcttgccagttagaacaggcgatatagtgtggaataatgagggtgtgaatgtacgcaaagtgataagtattgtcacggaagaagaggctaaacaggtgtttgttgcagatggcgtgacagatggggccggatttttctggtcgcgttatatcggtgaatcggatttaggtatccttggatttgaatcgaaagaatcttttgaagaagaaggcgtaggaaaactctctcgaccagaattattatgcgtgaaatttttatttcatttgctgggaaagcagatcggtttgaatatatggaataataaagattatctgtattatcctgttctgtggccagaggaaagggaagacggaaaatatgaatggatatggtatttgtttttccaaccgtatcgcccaccagtcacatcgtttgatgaagaacagtgctttcggtttgatgaatatcgatggcattttgaaaaagtggatcggaaaaagcaggatttggttcgaggtctgtaacaagtattatgttttaagtactaaacataaatataatttctatcttctatcctttaaagtagaatggaagcagcctttatagaatacagttcataagcttgttacatgtttgattaaagtttaattcaatcaatgctagacctgttcttttattttcccctaggcagagatatgatgatattaagtacatttgcctgcaaaatatggatccaatagttaggcaggaagtctgcactgtgggcaggaaactggccctagcatgaatcggagagttattattgcatgagaataaagaaaaagcgtaaattaacatggctatgatttatccttccgagattctcaataatatgatccacgaagtggaaaaagcatttccgttggaaactcctgtttttccaacaagtagtattcgcgatctcattgaaaaccccgaccatccggatgatgaagggcgagaatgcggcgaaccgtttttgaaccaacgctggattgatgttcctgctatacaatggtactataacgccgagtttgtgagttttgctgcaagtagtgctcttgcctattttctcccgtcaatcataaggctttcttatcttgaggaaatagcaaatgaaaaaaggtacatgagtgacacgagggaatggatgatgaatgtactaactggaattaatttttggggagaagaagtgcattggcggataaaaactacaaatgatatctatcattcgtatacaaaaaaacaacttgacttagtcagaaattggattttattcgaaaatagaaagcacaacgatgaatccggttgtactcatgctcttgacttggtagatagggcagcaaaaaaattaatataaatatggcttattattcccatgagagtctgaataatatgattcaggaagtggaaaaagagtttcctcttggaaattctttttttccgacaaccaacattcgggagctcattggaaatccggattatcctgatgatgaagcaacagaatgtgtcaaaccatttttaaataaacgttggattgatgttcctgccattcaatggtatcacaatgcagagtttatcaatttttcatcgacctgtgccctttcatattttttcccttctattatcaggaattcctatatggaggaaatatcaggagcaaataattatatgatagacactgaggaatggatgatgaataaacttattataatttgtttttcagaaagaatacgggactacgtacaaaaagaagtagattatatatatcattcctatacaaaagatcaactcagcatcgttaggaaatggatattatttcaaaataaggataattattttactgatggatgtgataatgccttaaaaatattagacatggcaataaggaataagtaacaattcatatgttaattcttagggatatgtcctctacaatggaataactaactatggactctctctacatcatcgggtttccgtccctctatggaggggcgggagccgagctttaccaccagattaaggtttggaggcacatgtgtgtggatattcatctcattcccacccaaaaaaacgtgcaccgtgccgagctctatccggaaatggttgggcagggcgtcacggtacatgaaggatacgactggtcagccattccggaaggggctcccgtcatcagtttttgcaatgaagagttcctgacagcactgccggaaatacggaaacggacgaggaggacggtcttcgtcaattgcatgacctggcttttcggcagcgaaaaggaagccatgaagaggggagatatttccctgtttctttaccagaatgaccgggtgaggaagaacatgatgccgcgcctgagagccttgaatgccgatccgtccatccgcttcatgacgttcaagccgtattttgacacaaccgattttccttttattgcacagcgttctacggactggttcggcgcgggacacatttccaggcaggatgaggataaattcagcaaggacacgtggcacatttacgagcattttgcttcacccgtccggaagagaggaacttttcttggctttgatcagcggagcgaggcgaagaccggaaggccgcccgactgggtggagacgttccatgaccagaggtctctatcccagcaggagttttaccaaagatgccacatcgtgctgcaacccacggatacgacggagaattggccgcgcgtgggctttgaggccatggcgagcggaagcgtgcttattgtggacaagcgcggaggctgggaacagatggtggaacacgggaagaccggatggctgtgcgaaagccccggggatttcatcacatacgccaccaagatggcgtgggaaccgcattaccgggaggatatggcctccgctgcccgggaacgcggcatggcgctgggagggctggaagcgtccagggaaagctggctggaagtgtttgaagcaatcagtcggataccggattagcaactttctccccgccatgataggtggatgatctgttggcgcacatggtcagataagccacgtgccgtatcggcagaggtttttctgcctgttcatgctgtaggcgatgatgtatttgaggaggtccgcctgggagtagccgtgttctgcggccgccaggcagatggagccgcttttgcccaggtggcagcagatgttcatttccaggatgcgccgttcgcctttttcaaagtcaatccggtagtcgatgcggaaatagtccatcggccccagggcgtcccagactttctgcacgtcgttggcgatgtcctgttccaggccgtgcacggagactgtctggtagcccaggtggtcatgcagtttcaggtcttccgtgatgatgctgcccggtttgtcggatttcggctgcacgtatcccaggatgacgggtttttcaccccccagcacgggaaccgtgacgtcaatgccttcgcagtattgttccacgagcacttcatgcccttcctccatcaggcgccgggcgcacgcggctaccgcctcccaggagccgcagatgctgtcttcccgaatactgccggaagcggctccaaaccgttttttgacgaagtaggggccgggaaagggcgccttgtccggaatgcctttttccccggaaagcccgatgccctccggcatgttcaggcccagggagcggaataccagcttggtcaggagcttgtcttccgcaatggcgcggatgttgggcggggcgcccaaataggggacctggatgaattcgcagtacgaggagatgaatatttcaggcttggacatgccgaacctgttcatcagggagaatacatagtccacgtttcctttggcgaattgcacggaatagggcttggaggaggagacgacgtcatagccgatgtcctgaatggccttgtaaatgttgtagtggtactggggatagcctccgttgcccgtgtagggttttttggagaaatcgggagcgtcgggggcatacggggccagatacatgatccttgccggcttgccatattgattgagttgaatatccggtatttcaaacatggtctgtggcgattgcgtggaatgtttcttggattatggaaatcgccgcagtgttcaaataatataaataataagggacggcatagccgtcccggagagaatggaaaagaaggagagagagctcccactctattttctggacatccccttggccacgcgcttgacatattgctccatggacggaagttcctgttcaatgcattccaccagcttgagctgcgtgcggcagcggatgaggttgtggtccgggcgggaaaccttgaagtattggtctccttccaggtagtccgtcaggaaccggatgccgatttccagcgtgatgagttttccggaaaaagcaagctggtctatttccgcctgggtcaggaagccgtgggcggcggccagatacccttccacaatggattggaacatcggcatgcgcatgcgcaccttgtccaggtcttcctcatcttcttccgtaggcggggtaacggtgcgcaccatgtcgccgaagtcgtacagcacaaggccgggcatgaccgtatccaggtcaatgacgcagacggcgtggtccgtatcctcgtccagcatgacgttgttgattttggtgtcgttatgggtgatgcgggtgggaagcacgccgctggcctggaggtccagcaaacggtccacgtcctgctcgcgcgccttgatgaagtccagttccggaaggcaggtggaaaggcgttcctgcggatcctgcgccgccacttccaccaggcggttgaagcggttccgggtgtggtggaatccgggaatggtttccacgatgtcgtccggattcatgtcgctgatcaagtcctggaaggagccgaatgcaaatccggcctggtacgcctggcgggtgttttccaccacgtcgtaggtatgcgtgcctgccaggtaattgtagcagcgccagatgccgtcgccgggaatgtcgatgtagttgcggccgccgcgtgccggatagaggttgagggtctgcccggcggagtccttcaggcggcgcaggactttccagttgatgtgccgcgtgactttctccacattgcgcatgacggctctggggtccttgaagacatagtcgttgatgcgctggaggatgtaggagtcttccgttccgtcgcttttgcggtaggtggccttgtaagtggtgttgatgtggccgctggggatttccttgccggtgacgaattccccttcaatggcgaagaggtctccaattccggcgatacggcacaagagctggtcggggtctgtcgttgcggcaagcggagcggtcatgtggaagggagagagggttggacggatggttttaacggacgaatttatagcctacaagttcgtcaagcttgctcttgagccgggaaatgccttctccgttgagcgcggaaagggggatgacgtccaccttaggaaaacgcatgcggaagttggccaggttttcttccgccccttccaggtccattttgttggcgacgacgaaccagggctgtttggccagatcttcactgtacagcttgatttccgtgcggaggttttgaaggtcttcaatggggtcgcggccttcgctgccggccatgtccagaacgaagacgagcaccttgcagcgcgtgatgtggcgcaggaattcatgtcccaggccgcggttgttgtgcgcgccttcaatgatgccgggaatgtccgccacaacgcagcggcggaagctgtcgaattccactacgccgatgatgggctggagcgtggtgaagggatagttggcgactttgggcttggcttccgagatgtctcccagcaaggtgctctttcccgcgttgggatagcccaccagtccggcgtccgcaatgcggcgcagttccatgaagaagacgccttcctccccttccgttcccatctcggcttccgtaggcgcctggttggtcgcagagcggaaatgccagttgccctttccgccgatgccgccctggcacagcgtgaaccgggtgccgatttccgtcaggtccgcaattttttccagctcgatgccttcgccttcccgttccagccaggtcgcctccgccatggaggaggcattgctgcggtagatgatggtgccggggggaactttcccgatgacggatttgccgtttttgccatgctttttggcgctttgtccgcctactccatccgtggcgatcaatttggggtcgtagaaaaaggagcgcaggtcattcgtgtgcgggtccacttccagaatgacgcttccgccatcgccgccgtctcctccgtccggaccgcccttgggcacgaatttggccctgcggaagctgaccagcccgtttcctccctttcctgccctggcaaatatgcggatgttgtcaacaaacatgttctgaatatgaagcatttccccccaaaacgcaagacaagtgcaggactgtacggcttttccatggcatgtgccgctaacttttccagtgaaccggaaagctgtttggcaaaaggaaattccggaaaattacggcaaccccgggtatttttccgacggtccgtattggttcgttccccgctggctgtcttcacagcagtaaatgagaagaataatgctccctatcagcggaaccagataaagcagcagcataattccgcctttgttggtgtcatgcaggcgcctgcatgtgacggccagcgaaggaatcacggtaaatagactccatagcagaaggggaacggcacctgccatgccataggtaaaagtttcagttgatgacatttgctgcggatgatggcaggcaaacaggatgatcatgaagatggtgaaggccatgtccaacaggagcaggacggcagtctgccccaatacccagtaccaatattccgaacgggtagccctcccggaaaatacagcgtatttggaaattaccgatttggcggccgtcagcagattgtatcccttgaaagctgatgcttgcgtggcgttcatgcctgatgttagccgccgcgggtccgggatgtcaattcactatccggaggaacgttttatataggagatttaaagtgtgtgaattatctattaagaatatcttttgggaaactcctgctggtcagaagtctggaaaaatggagccgcatgatggaacttcatggaatccgccttctgaaggagaggcgcatgcaaccgcttttttcccgggcatgccgggcaaacggtcttttggattgaaaatcagcgtcggcatggcatgatgcccgtgaatcatgccccgcctttccatccaattgcccgacggttccgagaaaaccatcgttcttccgaagaacggcgaatatttcgcccgcatcggacgcgacgaacattgtgaaatagtgctgccttttcagtccgtgtccggagaacacgccctgcttcagttcaaggagggcgcgtatgttctggaagacctgggttcaactaacggaatcaagatcaacgggctcacgcccatgggtgccgcctctctttacgatggcgacgaaattgccctgggagatgccaggctccggtttgccgaagagccttctccgggactcattcccgagccgaccgaagcgggggaggaagaggcagctccttccgccgccatgcggaatttgcagcaattggcggacgaggccacccgtacggcgcggaagaattatttgtggatggccctgtatgccgtcctgatgttttttctggccgtttttgccgggttgacttacaagcattacaaggtgacgggagaattgctgccccttcagtggctcggcattgagtctcccaaggcagccttgaagtccatgacgcctccgcaggcggcggacgccgcgcagcagtaggccaattcaagcttttccgccgttttcacgagctggcaggggtattccatcgggcgcgttccgcatccgggaacagcatgaagggagccacggcaccctgttccagttccagcagatattgcttgatagtcaggccgcccgcataaccggtcagttttccattggctccaatgacccggtggcagggaatgatgatgctgatggggttctggttgttggcatgccccacggcccggcaggctgatggctgtccaatttgccgggcgatatcgccgtagcttctggtttccccatgggggatggtttgaagggccttccagaccgtttgctcaaattccgttccctgcggagaaaggggcacgtcaaacatgcggcgggcaccttgaaagtattcgtccagttggctggctgtttggcgcagcaggggcgtttcctcccattccacatgctccggttgcaccatgcggctaaagaaaacgtgcgtgacggccgttccgttttccacgatgacgatggcccccacgggggtttgatgaagaagggcccggccacggggtgaaggagtggtcttcataccgtaatcatagcatgcggcggaagagagtttctatccattttacagggtatttccgccatcctgcaagggaagggagggaaaaggcgcccgtccggacgtattttgtttgaaaggctgcggttccaagtacagtattggtccgtatgaagaagagcctgtttgccgtgttgttggccgcatgcctgtgcatgtccgtaaagggagaagacgccaagcctccgaagacccttcccggcggatgggtttatgtttggggtgacgagttcaacgggtccaagatagacgccaagaagtggaagccggagctgggtgtgatacgcaatcaggggtcccagcagacctatacagcacggcccaagaacatgaggctggaagacggctgcctggtcctggagacccattttgagaaattcgccaatatcaattacaagaagagtccgtcggactggattaagaataccaaattcatgccctacacgtccggttccgtgacgacgatcaagacgaagaatttcatgttcggcagactggaagttcgggccaaggttcccagaaccaagggcatctggcctgccatctggctgcttggcaagaacaagtggggctggcccgtcaatggggagattgatatgctggagaatatttcccagcagccggatgtggtttattccaccttccatttgagcccggacggcgtgtccaagaaggatgcttcccgcggaggcacggtgaagattgataacctctccgatgattttcatacgtatgtcatggagtgggacaaggattccatcaagctgatggtggatgacaagctggtgaaatccattgatctgaataccaccaattatgccaatgaggcgggcaatccgttccgtacgccgttttacctcattctcaattctgccgtgggcggcaactggtgtgaaaaggctccgaaggatggcaacggttatcccgtgaagttcctgattgattacgtccgtttctaccagacgaaggagcacgcccagcaggccaagcagtttgatccggaaaccggattgccgaagaagaagtagtcccgcctttttcctggctggaacggttccggtatgggggcagaagcggaacgtgtccggttttgtccttgtgcgtaggagataaggcggagacagctttttaaagaatcctttcgcttcgctctggagtggagtatgccctaaaggcctggaggccttcattcccgggtgagcgcattccgtttatgccggggtgatgtgttcttttaccgtgtttcctgatggtccgcactgtaaaaacaggcgtttgatccgttcatgttccggcttcactcctcctgtggatttcaagctgaacatttcatggaatggcgttgcgccgctttcggattttgatgcagtggcgcaaaaaaacggccccgccggacaggaggggccgtttttgctgtcaaaaaggaaatgccaggctttagaaggctgttcccgtggtctgggtcagttcctggaagcgggccaggatgcgggcggtcaccggaccgattttgccggaacccagctggtaggcgtccagtttggtgacggggacgcattccgctgccgtgccggtcaggaagcattcatccgcgcaggtgatggtaaagcggttcatggttttttcctccgccgggatttgcagttcccggcagatttccagcaccacgcggcgcgtgatgccgtccaggcagccgtccgtgacgggcggcgtgaagacggctccgtcttttacgatgaagatgttgtctcccgtgcattcggccacgttgcccaggtcgttcagcatcagggcttccgctacgccctggcgcacagcttccatcttggccaggatgttgttgagatagttgagggatttgacctgggggcagagggcgtccggacggttgcggcgcacggagctggtgatcagggccagcccgttttcatacacggcgggatcgtacagggagattttatccgcaatgatgaagacgctggggcgtttgcagttgaaggggttgagccccaggttgccaacgccgcgggtaaccaccaggcggatgtagccgtcgctcaggccggaagccgccgccgtttcgcataccgcgttggagagttcctcccgggtatagggaatgtccagtagcagataatgggcgcagttgtacaggcggtccatgtggtcttccaggcggaagacgcgcttgttgtaaaaccggataccttcaaaaatgccgtcgccatagagcgtaccatggtcaaaaacggaggtcttggcctcctcctgttcctccagctttccatctaaccaaatcttcatcgttgtctagaatttagaaattatttatgccagagcaggatagccccatttgaagagggggggaagctataaattcaccggagagaacaaaagttccgtcacctgcaacgggagaggcacgcgcgcgttaaaaatatatggaggtattcatggagcaggcttgacatttattttccagtgcttttagctctcgcgcgcaatgtcagacccttccaagttccgcaacctcgccattatcgctcacgttgaccatgggaaaacgaccctggtcgaccaacttttgcaggcggggggagcctaccgggccaaccaggccgtgcaggaacgcgccatggattccatggacctggaacgtgaaaagggaatcacaatcaaggccaagaatacttccatcctctggaacggctacacgatcaacattgtggatacccccggccacgcggacttcggcggggaagtggagcgtgtgatgaagatggtggacggcgtgctgctggtggtggacgcttttgaaggtccgcaggcccagacgcgtttcgtgcttcgcaaggcccttcaggaagggctgatgcccattgtggtcattaacaagatcgaccgcccccatgccgacccagccgccgtgcatgaccaggtgctggagcttttcctggaactgggcgccacggacgaacaatttgaagctccctttgtgtacgggtccgcccgcgacggctatttcatgaattccatggagggggaacctcctgtggactgcacgcctcttctgttcaagattgtggagcacatccccgctcctaaggacgccgatccggaaggggagttcaagatgctcgtttccaatattgactgggacgactacgtgggccgcgtggccattggccgcatcacctccggcaccgtgaagaagggggataccgtatggcttcaccagagcgacggcacctgcatttccggcaaggtgacccgcatgtttgaatattccggcctgggcaccacggattcggccatcggcgtggcgggcaacatcgtaggcgtggcggggtttgaaaacgtgaacatcggtgagaccctgggcggttccgcggatacggagcccctcccgtttgtggcgattgacccgcccaccatttccatggagttttccatcaacaacgggcctttcggcggacgcgacggcaagaatgtaacttcccgcgtgattcgcgaccgcctgatgagagagatgcggacgaatatttccatccaggtggaggatacggacaaggccggcgttttctccgtttccgcccgcggggccatgcagattgccgtgctggtggaaaccatgcgccgcgagaattacgaactgtgcgtttcccgtcccaccgtgatcatgaagagggatgaaggtgaccgtcttacggagccgtatgaaacgatttacgtggaagttccggatgagcacgccaacggcgtcatgaagcttctgcacgcccgcaagggacagatggaagacatgatttccaaggagggcacgggccacaccttcatccaggcctatattcccacccgtggcatcatcggatttgagtttgagctggtcaacctgacgtccggccacggcattttctcccacctgttccgggattacggcccctacgccggggacatcaccacgcgtaccaccggtaccctggtttccatggaaacgggcgtttccacgccgttcgcgctggtggcgctggaagaacgcggccgtctgttcgtagggccgcaggaagatatttacgaaggccagattgttggtgaaaacccgcgccagatggatatgccggtcaatccgtgcaaggaaaagcacctgaacaacatccgctccgccacgaagggggacggcatccagctttcccctcccgtcgccttttccctggaacgcgccattgagtacattgagcctgatgaactggtggaagccaccccccatttcatccgcctgcgcaagcgcatcctgaacgccaatgaccgcgtgagggagtcccgcaaagctggcaactagaggtgccggaacgccggagaggcgaccccgtcctatgtagttgcgtcctgatggccggtaaggtagaatcagggcgatggattgtagccggatttcctgttcccctgtccctgttcacgcgatgatggagcttctgcgtgagctggggccgttccattacatgatgaaccaggggaatgtgggggatgccctgattgccgcttccacggtcgccctgtttgaaagggaagagctgaatttcagttcatgcggcccggaactccctgcaggaaaggaggaaataacgctggtttacggcggcgggggaggttttgtcccctattttggcatgctgcctcattatgtacgccttttttcggatccgcgcctccggaagtgcgtgatcctgccccagagcttcagggattgtgatgaactggtggatgtgctggatgaacgttttaccgtgttttgccgggaacgggctagttatgactactgcctgtcaaggaatgggaaggcgcgattcctgctggcggatgacatggccgtggccgcggagcccgagatgctgaagaagcggcccgtcaggctgccttttctggagatggaggaacgggcgtggggcaagcgcatgaaaagggatgtcaagacttccttggtagcgttgcccggcgccggaaagcttgccgtttgcctgcgagatgatccggaaagtaccggccacgctcaagcgttgaaggaactccctttgaatacggacctttccgtgtattccgtacgcgtgattgatgaggtggaacacgcttttgcctatacccgctggcttttgaaggcgctggaccagcctgacgccatcttgacggacaggctccatctgggcatttccggagctcttctgggcaaggaggtttttctgatggacaatgtttacggcaaaatttccggaatttatgagttgtccctgcgggagcgttttccccgcgtacatctgttgaatgagttgagtgaatttccctggctggagaaggttttgactgtaccggacctcgaccgctgccgggaaaggaaggcgaagcatgcgcggcagatagggaaagccgccgctttgtccaagtacctttattaccgcaaggaggagaacggagtgctccgtgtcaaggtctgcggcttgcggatttgcaagaagcgggtggtttgaggatatttatggccgccgcgcgcttgcatggcgacaggctttatcattcgcggctttgatgcaggggaccctcttttttacgtttatagatccgaaggccaagaatcttgatgcggacgctggccgcatcttcttttttatagtacaggaagtgtttgattctctttcccatccgttgagggaaagtcaatggcttgggcgccgggtacacacccagggacagcctttcctttaatgcctgagcccacggttcctgagaagttccccatttttcggcatcttccagaatggtctggtattcgtaaaagatgtgttcattccatatctccttgtcgcgaatttcatccaaagatatatcgcgtaaataaaaagctccggaggccttgaaattcaggatggtccggaagcatttttcgcatactccgcaattgtcctgatccggattggagtgccagcatactctcaggttgcgcagtcctctttcccattggctgaccaattttgccttctggctccgggtgaatccccagccttcttcatacacacggaatcgccgggaagaaaggagggggtccgtcacaaagttggagccaaaatccactacgccggatgaatagggataggtgctccccaccagtacattgccataatccctttgccaaaaggatgccatgcctgtcaaagccgccagatgaaccagttgccagtgaaatccccagttaagctggttgttccagaatgtatccagagggaaaatttcaggataattgcttccgcagcgcagaaggcgcgtgatgcccagttcctcaatcgtagagagagctttttcataacagcgcaggaacaggggttcttcgtaaagtccccggtctccgccctgtaccagcaggcaggctttcacatccagggaatcataccgcggtttccgatgtggggatgcatgcctgtacaaggcgaaggtcgcatccagcccctgggaaaagagggcaaccgcagaatcgtccaccggcgcgtttctgtcgtctataatccggtccggcttgatatctaccacgttaagatactcaggatgcatttgcgaccaggcttccatgaaatgctccaaattccgaagcagagtaagactgacggcccctttcacttcaaaacggcctccgacatgcatcatttcaaaaatgagcatcctgatccatgcgtctgcaaaattgttttccactgtgggggcctggtcgaagggtgcgaggtctacccatacccggcagttataaccgggagaaataaaatcgcaatacaggcgggaagtcccattgggttgaatatcgacctgttgttgtggaatgagctgggaagtagccatgggaaaccggaatcggaaggaggttgggttactgggaacttcgggacaacagggaaggctgctttctgatgcagtggaaccatacctgccgtttttcagatggggaaaggactgtggaatgcttcaagagataaagcatttcctgctggaagtggcctgaatgaacaatcgtttttgcgaggaagcgcagcggcttgtcttgaaaagccctcaagttgaaaaccttggaaaattcctgcaaatgaccaagcagataaagctgggaaatcgtacggcggcatttcaagcatgtgccgcagttgaaagcgcgttccaggcaaacattgaggaagtcgcaggcaggaggataattggcaaggatggctgttttttcataccttgccaaatccaggccatgcaggtggaaacgtacctgttccgtttccgccgcggatagaatgtgggattgaagatggaattcacagtaatccctccggtccctggtggtgaaatccggatgattgatatgataggtggcggaagtccagtatgaattcattaatccattcaggacaagcacactgccggaatccaaaaagggaaaccagttcaaatatccctcgttgccataaaaatcgtacagggatgaatccatccagacgaattccataccgtttttttcagcaaaattccggctgagctttcgtctgccttcaagcagttcccggtttccccaatgggagccgcagttattgtggaacaggtgggtgacaggcgtccccgccttttccagctccgcgatagtgcacagggaatccacccccagggacccgcccgtaccaatgcggcagccgggaatgggggaaagaacttccgcgtgaacttctcccgccagttcaacgggtttcaggaaaggccctattcctgtcaggatatgggagaggagccgtatgccgaagtggtacaggtgcgcggagatggcgggaagaacgcgaacctgaccgccctgctgggaaatccatggaagcagggccacaagggctccatccgccctgccgggattcaaaaagtcacggaaacgggagtctaccgtaaacgaaagcgtgcgcggcgcgtggccgtcctgaagaatgggataggagatggtaaccgcatttccctctgtctgtacggatggatggttaatcgtgatcatgagtgttggaagagttggcggattttatgtctcatgccggttggcggaagatccctttccgccagccgccgttccaaggtgaccgcccagggctcctgccccagtccgttggccttggcatgcttgagtatttcctgggcatagaggacgcggaaagggcggttaaactgaatttgggagatatcttcattcatggcgttgcgcggcatgcacgttattttgtccctgggcactcccatggccatgaagttcatgatggtcaggcggcatttggtgcatacgccgcagttgccggacgcgtctttaccttcccagcaacatctcagcagggccatggccttatcccactgcgcgatgagtccggctttttccgtacgatcatgccccatgccgtccgtgacggcttccttgctgtgggagcctagatagtggtccgtgatgggattggaggcccaggggtaggagaaggagtcataggacccttcgctgcccgccatgaagtaaccgaagcgggaggtgaaaacgcgcattcctcccatcagcatggtatggtaggtcatttcgtaatccatccccatgttccggaaattggtccggatgcggtagaattggcagatgccgatgtcttccagcaattctctggccttggagaaagccttgtcaaagtgttcctggttgttttccgcaatgtccgctccctggaacatcacgcaggccgtcagattaagggtctgggggcctgccaagcctttccggtggcggtaggcggtgaagcaggcgtccagaccgccggaaaagcaggaaatggcttcgtcccgttggggaacagcggagtcgtctcgctcggcggcatggatggtgacgcggtgaaagacgttgggcatccagcggttccaggcttccgcgtagcggtccagattgaccagcagggaacgggacaggcgccccggccctgtaacggagaattcgccgcccgtttccatcattttatggatgaagaagatgcaccaggcgtccgccaagtcgtctttgtcaatgtccacgtttccggtggattcaatatccatgtattgatggaattcccggcctgcagctgtggagaggaccgctttcagcgttgttttgtgtggagagtggacctcggggggaaaaatgcggagttcgttgctcatgtcgaaaaggagtcagtcttaaagtcgaacgaacattaacgaataagaaatccgcagacaacatgtttttttgaggcagaaagggtagcagcaggagaaaggaggattgcagagcgatgggaaaagaacgcccctgcttttttttcttccaaacctcccattaaatggatggttcaaagaaaatgttccgctgtcgtccagttggcggatttcttatccgcagtccgaagagcgaaaaaaatgcccggttcctttggggaaaccgggcattgcatcaaagccgttgaagggctgtttatatcttgccgaagagggtcttgccggcggacatgaggttgtctgcggcttcctggagacgggcggcgactcccttttcacccttggcgaggtaggaacggggatcgtagtccttcttgttgcccacttcaccgtcaatcttgagcactccgttgatgtgttcgcacatgtgggagacgatcgggcgggtgaaggcgtattgcgtatcggtgtcgatgttcatcttgactacgccgtaggaaacggcttcgcggatgtcggagagttcggaaccggaaccgccgtggaaaacgaggggcatgcgggccgcttcgccgtgcttggcgactacggcttcctggccgtcgcgcaggatgctgggcttcagcttgacgtggccgggcttgtacacgccgtgcacgttgccgaaggtggcggccagcatgaatttgccgaggggggccagggcttcgtacgtcatcagcatgtcttccggagaggtgtagagcttgtcagcggggtggccggagttgtccacgccgtcttcttcgccgcccacgacgccgatttcaatttcaaggacgatgcccagttcggcgcattccttcagcagttcacgggaaagcttgaggttttcagccatgggcagcgtggaggcgtccagcatgtgggagttgaagaggggggcttcaccgcgttccacgcggcggcgggattcggcgatcaggggacgcaggaaggtgtccacgtgttcgggctggcagtggtccgtgtgcagggctacaagcacgttgtgcttttcagccaggcggcgcgtggcttccgccagaacaatggcgccaagggcggaactgccgatggaggtgccggaggcgaatttgccgccgccgatggaaacctggatgatgccgtcgctcttggcttcggagaaggcgcggagggcgccgttgatcacttcgatcgtggtcacgttgacggccggataggcatagccttccttcttggccgtttcaagcatggtaatgtattgttctggtgtggctattggcataacggggacatgataggtgttttttttcgggagagcaaggctgaactcaggcgcgcgcaggggttgcagagctcttgcgggacatggtcattcgcggatcattttcgcctccggctgcgccggttctccggagtccgtccggtagttgacgcgctgcgcatccaggaagggcttgtgcctgtccaggcgttccttgaagtctgtgaagtccttgcggccgggctgcgtccagcccagctccgcgatggcgaacatgcgcggaaacaccatgtactgccatttggccagtgtggtcatgtattcgctccagcagcttccctgcacgcccaggatgtttttttcctgttccggggtgagccccttcggaacgggattcatgttatagactttttgcagcggaatggtggagaaagtcgccatttcatattcggggccttccggatgcggaccctcctgccggatcaggtacgtgctttcaaagggagtcatgatcaccttgtttccgtgcttgatggcttcccgggcaatgccgggatcatgccagaccatcagggtggccgtcttggaaaggccgccttcccggatttcatcccagccgatgatctgtttgccgcgcgcgttgacgagtttttccacgcggtggacgaagtagctttggagttcttgttcgtttttcaagccgtttttcttcatcacctcctgggcctggggggagtttttccactgctgcttgggggcttcgtccccgcctatgtggatgtagggggaatccggaaagagctggcagacttcttccaggatgccgtcaatgaatttgaaggtgggttccgtgggactgaacgtgaaggggagaatgccccagcgcgtcgccacccggggcttgtagccgggaatgtccttgttgccgaattcgggataggccgtgatggcggccgcggcgtgtcccggcgtttctatttcaggcacgatggtgatgtgcctgcgtttggcgtagtccaccagctcctttacttccttctgggtgtagaagaaggtgaagggttttccgtctcccttgttgcggttgccgggaatggggctttccgggcgggtggcgccgatggaggtgagcctgggatattttttgatttccagccgccagccttggtcttccgtcaggtgccagtggatggtgtttaccttgtagcaggcgagcaggtcgatgatggttttcagctccgcgatggaacggggattgcggccgctgtcaatcatgatgccgcgccacgtgaagcgcggactgtccgtgatggtcatgcagggaagggcccagtggccggcggcatccttttccagagactgcttgagggtctgcgccgcatagaaagctccggcgggggacgtgcatgagacggcgatgccctgcgtagagaccttgatggaataccattccggagacagggaggcgtcttttttcaggaggatctgcacggcattggccgcggagggagccgggcttaccttgatttgccggaggttgttggagaatcccgtcacgaaagaggcaatgcagcttttatctcccgttttggaaacaggcagcgtgttgctgaccagaaatcccggcttgtttttttccacatccagcgcggatggaagggggatgatggccgggtcacccggtacgggcctggaggggagggaataggcggcggacgcgaacaggaggcctgcggctagaaggaggcttttggaaaacatgacgggaaagggaggaaaaagtttcacagtaaatagtatattccagaagcgtccgcaaggcaactttacgggatttgccctgaagggaataaagaagccctgcctcccgtgccgggggtggaccggaaagccgcagggctgatgccggggcacggattttttcgaaaatccgggaatgcacatcaggatgtgttatttcaggatgatggaagtggtgccgggtttgatggcgtattttttgccgttaatcactagggaataagggttgttgcttgttacgccaacggtgtttttgccgtcaaaaacgatgtcagtcgtagtcgtcccgaaatgaagattttttaatccgtgcctgcctttctcccttttcaatctccactggacttcattccgtagtgcagaaatcttatggaagcccagaacgttttcaatgaagagggaaatggggcccagcgccgaccagccgcaaaattccggccgggccctgcgtccatgttcggtagacggctcgttggaactggggctgtagcattcccatatcgtgtgcggtttgatgccatggtaagcggcaagctgctggcggatgattttttcagcgatcgtgtcggcttcttcatggtagccgtattcttcaagcgccttgacggtcatgtacgtggtgggcagccagatgccgccgcgccagtaatccccggtttggccatggtagtccttatccctgcgggaaagggtgggcgtcgggtagtctccaccgaattcctgcgggtccagaaggtattttaccatcttttccgcctgggccggcgaagcgactccggctaaaagtggccaataggaggccattgtcctgatgcggcagggctgcctgttttctatcgccacatcatagtagaacccgtcctgctcatcccagtacagttcgtttattttgtctttcagcttgcggtagatggcctcccatttcccggctgcgtctgcattgcccagtgattgttccaattgggccatgcagcgtgcgctcagggcttgctgggaaatggcgtcaatccataaaatcttattgtagccgcctgcgtcccggcctctgggcgtgttgtccattccgctggcgccccccgtccatgtaaagccatcttcaccgatggcgttcaggtagatgttttggggagagcattcgaaacgttcccccgctttggcattggcaaaccagtcaaaatgtttttgaaggtactgtttccgattcaggatttcatggatgcggtttttgtttccggtaaagtcgtaatattccttttcaacccatgcgaataacggagggttgtccacgaggtgaatgcggagcggagttttttccttatcccaaatgggcttgtacaggttgtccatgcttccctctccggggaatgaatgcggcgcatacttggcgaagagcaccatgaaacaggtatcccaaatccagatttggtcttcgtaacagttttcatccatgtagggcgacccgggaaggccctcagggccttttcttacccgtccggccgcgatttcccatgttttatggtaaaggtccacgaggtctttgtcagggtaaaccggctggggaatttcctctttccagccttcctggatgcagctgtcatgatgggccgtagctccaaagccttgcacgcaggctattgcccccaggatgacgccgcatgctgtccgcaggtagtatttcattttcagtatacggccagggaggcggaaaaatatcgttttttctcgtctcgcggcgggttgaaggcttttccgtgccgtcatgttcccctagcgggtcaatggtgggcgtggaaccgaattagtattactgaaggcggcgctgccgccggaaggatgaaagtgaagcgacagcgtggaggaaagggaaaatgattttttccgtcaacatggaataataggaaaagggacgccccccctccggtttttaccttcgtgagacgccctgttgaaagtggagaaagatgaaatgagggaggttattccggaatggattccccccggatgaggtcttcccaggtctggcggctgcggatgacgttccactggtttccgtccaccagcacttcttccgccatggggcgggaattgtagttggaggacatggaaaaaccgtaggcgccggcggacagcacggccaggagttctccctggcgcacgtccgtcatgtccctgttctgggccaggaagtccccggattcgcagatggggcccacgacgtccgtagtgatgcaggattcggagaggtgttccctgaccgggatgatttcatgatacccctggtagagggcggggcggatgaggtcgttcatgcccgcatccacgattttaaaggttttggcctttccagtcttttcatacaggcagcgggtgatgagcgcgcccgcatttcccacgatgaggcgtcccggttccacgatgatatgcaggcccagaggctggagggtgggaacgacggcctgggcgtaagtgctcagcgtgagctgggcgcagtcttcattccaccattccttgacgccggaatccagcgtatcctggtaaacgatgccgatgccgccgccgatggagaagaattcgatgccgtgcttttctttcagcgcggcggccagcggagccactttcctgacggcttccaggaagggtttcgcctgggtgagctgggagccgatgtgcatctgcaggcccttgagttggaggttcggaagttcgcgggccgccatctcgtaaagaggttcaatgagttcaaagtccacgccgaatttgttttcagccttcccggtggtgatgtatttgtgcgtccccgcctccacattgggattgacgcgcacggctaccggagctttcactcccatggacgcggcgatggcgtcaatggcgcgcagttccgcctccgattccacattgaagcagtaaatgccctgttccagggcgtagcggatttcctcctctgtttttcccacgccggcataggtgcatttggaagggtctccgccggccttgaggacgcgaaagagttctccgccggaaacgatgtcgaaccccgcgccattgcgggccatgaggttcaggatggcgatgttggagctggccttgacggcgtaggccacttccgcgttaaggggcgccagggcttccctgaggcggtggaaatggttcagaatggtctgcttgctatagacgtacaggggggtgccttccttgtccgccagttcctggaggttgacattttcacagtagagcgtgccgtttttatatgcgaatgaatgcatggattattccttggttgtgctttcgttggttttcccggaatggagaggagggagcgggaatctgggcgtaggggggttgtcgatgagctgggcgatccaggcgagatccttggagctttccagcccgagcttgatcagcatggtgatggggacggccagcagcatgccgatggggccccatacccagccccagaagatgacggagagcaggaccatgcttgtcacgatgccgaattggcggcccagcagcatgggttccaggcagctccccaggaccgtgttgatcaccaggtagccgccggctacgatgatgcccgcggtggggctgatcaggagcatggcgagcaaggtggggggaatggccgcgatgatggagccgaaggtggggatgaagttgagcgcgaaggccacgatgccccacagcagcgggaagtccaccttcatgtaatagcagagcaggaaggccagtagtccggtggctgcgctaattaaggtcttgataatcaggtatttctggactccggccagagctttggaaaatttgcggatgcccgtgtcgctgttgttgcccagtttgttgatgttcatccggaagcggggggcttctcccaggaagaaggtcatcaggatcagaatcagggtggtgaaggtcagcatggaggcgagctgccccatcacccccgtggagaacgccacgatgcgctgcccgttgagcaggtccgggagttcctgaagcatctggtccgccagattgttccagtcacgttcaatgaggaaggcgcggagttcgtggattttctccatcatcaggggctggtatttgaccgtgaccgtccgggccaggtcctgccccaggtactgggccagataggccaggcccacaagaatgccgaagtccatgatcaccgtgaaggttaccgccagccagtgcggaaaacgaagacgtcccttgaaaaaagtggtcagcgggtaactgacgatcgccagaaagccggacaggacgatggggagcagcaccggcttccccgcctgcagcccggccgtgatgacgatgacgctggcgagcatgagcaggattttcaggccctcttttccggattctttctgaggagtcatggaaggattggtgttaacggggtgagtaatggtgtccgatttcctgcgggattgcaatattaaaggccctcattcccatcatgttcccggaaaaagcggtccaggtcttcaaagcgggtcaggaggtagtcaggcttccgttcttcgagcccctttacatccgcctccgcggcccatcctgcggcaagaatgcggatgggaacggcgcggcatgcgtccacgtccgtgggggaatccccgatgtagatggcttccccggcggaagagtccaggcggtccagcgcccgcctgatgcggtccggcttcacgccgccctcaggggagcctgtttccagaatggggaagaactcggccagatggaaaaattgaagggaaatctccgcgctttccaggcgtttgccggtgaccatggccagacggatgccgcggctgcgcagggcgtgcagcagtccggccgccccggggaagggagtgggcgccagttccggatgcagctcacggtaatagcggaggaacagttccctgcctttttcgtgcagttccggctttccgggaagcagtctttggatgacgcccaggtcgtccggcccgaactggcgttcgatttcctcatccgtcaacgttctgccgtccagttcccggacggcgcggcggaaggcttcccggcacaggggtatggtatccgcaagcgttccgtcaaaatcaaaaatggcggttttgatcatcagccgtaccctacatgccgcctgcggacggttcaaggggaaagccgtgcctgaatagtcatgatgacgctgcggggcgttccggaccggcaggacgtgtcatctcgtatggaaaggtcaacgttccgtccctgtaagctctctaattcccttatgcacgggaaggctccaaaagaatatttatccctgtggagcgtgattgcattgggaataggttccatggtaggagcgggatttttcgccctcatgggtcaggcgaccctgatggcgggcaaaaacgtgtactggtccttcctgctgggaggcgtcgcggccctgctttccggttatacctacgccaagctgggttcccgttatcccggttccggaggaatcatggattatttcaacgaggctttttcccataagaccctctccggcgcgctgacgctgatttacctgggaacgctggtcattaccgtggccctggtcgccaagtccttcggggcctatgcgtcccgcctgtttttgccggacgaattaaccaacatctattccaccgcccttttcgccagcgtggccattctgctgctgggagcattgaacatgggaggagccaaggccgtagggaagtcggaggtggtgatggtggcgttcaagctgcttattctgacggttctgatgcttgccagcttcggttcttccgtgccagtgggcgcggaccccattccggtgaaaggactggacgggctgctggggagcgtgggactgacgtttttcgcgtttgccggctacggcatgatggccaatacggcgggcaatctgaaaaatccttccaaaacattgcccaaggccattttcctggctatcggcatcgtgctggttctgtacctggtgctttcctacgtagtgctgaccaacgttcccgccacttccctggaaagccacacggaaaccgccgtggcgcaggccgcctatcccgtgctgggcgtgtggggcttcatggccgtatccgtggcggcgctcattgccacggcgtcagccattaacgccaccatgttcagcatgctggacatttcccgggcactggcgcgcaacggccagctgggagccatcttcaagcagcctttctggggcagcggcacggaaggctttttctatcttctgctgggcattctggtgatgacgaatgcctttaacctggtagccatcgccaatctggcgggggcctgtttcctgatcagctacctggcggtgttcgttgcccattggcggctccggaaagagacgcaggggaacgcgctgctgatcatcctcgggttcctgctgatgctgtttattctgggagcctttttctaccagatgttcttcagccagccttatctgattccgctgatcctcctgtttgtggccgcctgtttcattctggattttttcattcgcaaaaagctggcgaagggggcttccaaggcttcctaggctgtgggggttaggaaagaaacgctttccctcccgttgcacttttaatgcaggaaggaagtgagggggctggtggcggcagcccggacggaaacggcgggaaggccggccagatgggccatgcgcccggcgcggcaggccagcgcgaacgcttccgccatggaggcggggtctccggcggcggcgatggccgtattgacgagcacggcgtccgcccccatctccagggcttccgccgcatggctgggggctcccagcccggcgtccaccactacgggcacgacggcctgttcaatgatgatgttgatcagctccctggtcagcacgcccttgttggtgcctatgggagcgcccagaggcatgacggctgccgctccggcttcctggaggcgtttggccagcacggggtccgcattgatgtagggaagcaccgtgaagccttccctgaccaggatttccgccgctttcagcgtttcaatggggtccggcatcaaatactgggcgtccggatggatttccagcttgatccagttggggagtccggctgccgccgccagtcgcgccagtcgcacggcttcttccgccgttgtcgctccgctggtgttcgggagaataaggtatttttcagggtcgatgaaatccagaatattggcggcggggtcatgggagcccgtcaggtccgcccggcgcagagccaccgtcacaatttgggagccggaagcttccagagcttctttcatgctctcattggaagaaaactttcccgttcccaccatcaggcgggaggtgaattggcgtccggctatctgcaaaggtgaatctgtcattgcgggtgaagggtacctcccctttcctttccaggcaagggggaatgaagaaaaaggcaggagttgccgcggcatggacgagcgcctccgactgggaatgaaaggttgattcgtccatcttccagatttacccgccctgcgggcttcaagatgagctttccatccagccggacttgtccggtttcccggccttcatacaacctttccgataaaaaatattctgaaaactttccttcaaatccaggaaaaaccggtttttgaatggacggagggagaaaccccctcctcccctctattattccccgctgaaggaaatgccccggagcgctctgggcttgcccaggatttcctgataaagaatggccgttttcaaggattgggaacggcgcagggagtttttcagggaaagaggttcggacgcggcgaccgtgggaagcggttcaggccggctttccttcatttccctttcctgcaaacgatgcagggcggcctgttccgcgtcagacagggaacgcatggactgccgggcttcttccgtggcctttacgtagcgttccagcacgttctgggcggtttgctgggcggtttccgccgtccactccggcttgggttccggttcaggccggcgcttgcgggccacggcgggagtgggaagctccacgggtggggcggaggggcgcggagcgcgcgccggagcctgtggccgtgccggctgtggctgccgcggctgcggattggtccggcgcatttccgcaatgacttccttcacgcgtttttcatgatggtcttccgtgtccaggacgggcgtttcctcatctttttcttttggttttaaaaactcaattactttcttgatgagaaagatcgcccccacgatcagccagaaccagagcttcaggctgtcgtcatcgccgccggaggcgagcatgtatgccagtgaatccataaaggaggaagggccaccggagagaaaatccggtctctccggtggcctgagaatttatttaatggaagagggggaagcatccggcttggcaatggaatccctcatcttggtatcggccactacgttctggtagcgggcataatccagcactcccaggttgccgttgcggaaggcttccgccatggccatgggaatctgggcttccgcttccaccaccttggcgcgcatttcctgcgttttggcggccatttcctgttccgtggctacggctgcggcgcggcggacttccgccttggcctgggcaatctgcttgtccgcttccgcctgttcggcctggaggcgcgcgcccacgttgccggccacgtccacgtctgcaatgtcaatggaaagcacttcaaacgccgtggcggcgtctacgcccttgtcgctcacggtgcgggagattacctccggcttttccagaacatccttgtaggagggcgcggagcctacggcggagacgatgccttccccgacgcgggcgaccaccgtttcttccgtggcgccgcctacgaaaaggtccaggttggtgcgcaccgtcacgcgggcacgcactgccacggcaatgccgtcacgggccaccgccgtcaggcgcgtctggccggagctggggttcgggcagtcgatgacgcgggggttgatggaggttcgcacggcttccagcacggtcttggacgtgcctttcacggccaggtcaatggcgcaggcacggtcatagctcagcgggatgccggctttttccgcagcaatcagggcgaggacgcagtccacgatgtcgccgccggccaggaagtgggcttccagttcatccgtgctgatgtccagtccggccttggccgccgtgatgcgggtgtccactaccagggggtagggcactttgcggagccacattcccagcatgttgctcatggagacaggggctttcgcgaggcgcgcgcgcagccatgtcttgaagaatttggcgatgatggcgaagaagatgaccagaaagatgacgaggacgatcaccaggatggtcccccaggcggtggcgttggagatgtttgctaacagcaaattgttcatgtatccttccataccatattaaccgaagcagggtaaagatataattgtgttacctatggtttaaaggtattgacctttcggcggattcgtggcaatgcacttggccgtgcgcaccattgattttgattatccgctgccggaagagttgatagcggaccgccccctcccggaccgcgccgcctcccggatgatggtcatccaccgggataccggcctgattgagcacaggcatttttgcgacctgccggaatatgtgcgggaaggggaccattttatcctgaatgataccagggtggttcccgcaaggtatttttccaatgacggcgccattgaagtggtgcgtgcagaggtgctcaaccccctgctgtggaagtgcatggtgcgccccgggcgcaagatgaagctggggcgtacggtctccatcggtgatgcggtgggcaccgtggaaggcattgacggggaaggctaccgcctcatccggtttgaccgggaggtggatgaggaaaagtacggccgcctggcgcttccccattacatgaaccgggagagcgacccgtccgacaaggagcgctaccagactgtttacgccaggcatgaaggggcgattgccgctcccacggccgggctgcattttacgccggagctgctggcggccgttccccatgattttctgacgctgcacgtgggcgtgggaacgtttcgtcccgtgaaggcggacaggattgaagaccaccagatgcacacggaacattttttcctgcctgaagccaccgcgagggcgattaatgaggccgggagggtgattgccgtgggcaccaccagcgttcgcgtgctggagcatgtggctaccgcggaaggactgccgttaaaggagtgctccgggtcaacgaacatttttatttatccaccctacaagtacaaggtggtggatgccctgatcacgaatttccacctgccccagagcacgctgctcatgcttgtcagcgcctttgccggcaaggagctggtcatgaaagcctacctggaagccatccgggaacggtacaggtttttttcctacggggattgcatgctgattctgtagggttccggcggcctttccttccctctggcggaagaagcgcaggctgccttcaacgcttgccgcacggaagttgttccgggctgcgaggggatgaagacggagcgccgtccggggaagcgtccgggtgctgctcttttttaagctccagcagggtttttccgtggtccctgatttgctggagggcagtcaggaagtgcagcgtttcccccagcagtatgttcatgacgttggcatagtggcagtccgtgtttttcaggcacagccggggaaaataggaggcttccagctccggcgcattccatttgtcccggataacgcggcttctgcgggatgccggaggccagcagggatgctgccggtccctcaaataaaggaggtagcagtcttttaacatgtcgagctgggaggcaacaccggcacgtgcaggaggagtgatggacggctggacatcctttactccttcaagcgtcatgttgatggttgtttccgcaaggacggtccagtaaagaataggttccgccacggaacggctccgcctgcggaaccgcaggtagaaatgatggctgagttccagggccgacaaggcttttacgtaatgcaccaaaaccacccggccatattgccggaaaataaagtgttccagcttttgccggaggggagcgtcttccattcccgtttccttcctgagaagggtccactgttcctcgaatgttgaattttcagccatgaatttgggaagaggttatttttaataaatataaattatgttaccatgaaattcaaataaaataacaatcattatcaatgtttatcaaaataatccgaggaaaaagagaggaattcctgcggatggggcggtaacacggtaaccgcctggcgcaaaggcgtacgagaaacacctgcgtccggaaaaacagcctgggaggtggtaagcccgtgcacgacggcttgagatgtggatgccgcggataatgaaaacgccatgcccggacatgcaggcatggcgcttgtcaaatcaggcctgagccggatcagaagttgtagcggtagccgagggctccgccgatggaggtgtctccggagcggagatccgcattgccgtccacgtaaacggcgccgtagtcggagcagggaatgctgaggcctgcgcccagctggacgccggtgcggccgagcttggctcccctgatggtctggacaaggcccggattggccaggtaggccacgttggcctgtgccttgtcctccccgaagtcctgagaaaccagaacgcggaattctcccgtgatatcacgcccggtcaggttggaacccagaacgcctttcaggcgcagaccggcggccacgcttccggtggtaatatccatgtcatccacgcggagtcccgctccgcctgctccggcttcattgaagccatccacggaggagtgcatgacgctgacattggcgaccggctgaaggatggccgtccggcgtttgttgagagccaggtcataagtgagctcatacatggctccgaaactcatgccggtggtgctgaagctggcctggtagcttcccagctcatggcgtacgctgcgggtaatgtccgcatccgaccagcccccggagagaatgagggagtggccccatttcctgtggcggtagtggccgaagaggctcacgtagtaggtgtccaggtcgccggaggcggaatcagccccgtcggaggagtaatccccatagttggcggagaaggccgcgcccaaagtgaaattctccgagcagttgacgtccagcccggcggtgcctccccaggagttaagggtgaaaccgttgccttcattggaaccgtccagggaatccctgcccccgttggcttcaatccagccgttcacctggggaaggtctccctgaatgtagtcgggattgaggcccatggtttccgcgcggttgcggatgaaggtcatttccctccgcaggccggacctttgcgcggccaggatgccgggaatggccgttccggcggaggcgctcaaaaggtggttggccctcgcgtaatctccgtcgttccaggcgttggaaacggcgcggttcagggagctcagctccgttccgtccttgatctccccgcagttccagagcaggacggccccggcggcggaattggaggtatcagccgtggcgagcagggcgttgtccgccttgcgggttcctgtcagcacgatttggccgtcccggttttccgcatgcagctcggaataataggtgcccagcgcgccgtaagcgttgatattgaggtagctgcccaccatgttcccttcaaagagaaccagttccagcatcctttccggcgcggcgacgttggattcaatattgagggtggtcccgttgcggtctccctgaatggtcagcgtggctccgtcttccgtggaaatgaagggagtattggtctgtgccagcaggggattaatcacgagcgtgatggtggaaccgttcatgaactggcttgttccgttaaggagaagcgtggtattatgggcggctccggcggaggccatggcgagcgtaagcgtcccggtggcatcaaccgtcagggaatggagcagaatgggattggctgaatcacggatcagggccacttccccttccgtaatgttgaggttcagggtgtctgaccccgcgccggtgtaggtccatgccgctttccccgccttgttgattgtgccgttcccctggaaggagccggaaaaaacggaggattttcccgcatggagggcgagttccccgttgttgaagatcacggagcctttccccagcaggccgcccaccatggaattgcgtgtggagcccaggtccagcgcggcggcagcggattccggacccacggcgaccgccgctccgtcaaacctggcatttccggacagggtgaaggttccttcctggacggccagcaggccggaaccggcaatagtgatgtccgtgtccagcttgttgccgttgcggatggccagcatggaatccgcgttcagccgtaggatgccggtgccggtgatggaggcgttttccgtcaggacattggccgttccgctcatctccagggtggcgtcattcagtgttagagcgccttcctgcccggagaaacgggtggtggaggacgcatggaagatggaaatgccgcctccgttcagcatcatggctccgtaggcggaggattcggaagcgaggatgatggctccgctggtggaatccagatggaaccccgcgtttccggcgcttcccagcgtcagggcgccggcgcctttcttgctgagcgtgcccgtgccttggagagttccgttccacgtgaggggattggccgtatccagggtgatttggccgccctgggcggccagaacaccgtctcccgtaatggaatgaatgacaatgttccgggtggctcccgcgttcagggtggaagcggcggaatccagggccagcgtagctatttccatccgggcctggttggtgaaggccagcgttccctgggtgatgtgcagggtaccgttccgggtaccgtcaatgtagatggcgtctccaatggtgttgctgccgtcaaaggcaagcgactttccttccgccagggcgacggtgccggagcctaccagtttgaggccgctggaaatggtattgtccgttccggtcagagtaagggtggaatggagaagattgatggagccccgggtgccggtcagctttccgacctcggctgtgacttcctccctggcaagctgggacacgccgaaggttcctccgttcatcttcagctccccgatggtgttggaagcgccggaaagcaccagtcccccctgctgtacgtccagagctccgctggtggaaaagccgccgcccagcaccaggtttttagcccccgtcttgatgaaattggcgtcattgccgatgacctctccggcgcagatggagtccatggcggtgttggagagattgacggtcagcgctttccccgcagtgatggtgacgttgtattccgccttgtctcctctgagggagggcaggacgatagtagcgccttcacccggatcaatggtcatgttccggttgacgagaacggaagtgaagaaattcaggtcaatctggtccgtgatggaagcgccgtccacggacgcataataggtggggtcatccttgagcacccagcccatctccgcaaggagggctttttcctggtcgctggggtttctcctctggatgccctccccgatggaatattgcatcagggcgttcgggtcgcttgcagcgtccacgtgggacatgctggaaccgggagcgaaaacaaagggattgtaaacagtgaggcctccggaaccaatcgtgtaggaaacgccggtctggtaattgaagcccgcatctcccggatggttgccctgggcatccgtgatcagggaatcccagatcgtgtagtattctccgtatgttcctgtatcattcagcgagttgaagccgacgttatgcccgatttcatgcagaaggacgctgatgaagtctgtggcgttctggggcgtggtattgcctgtgctgaaaccgtagacgggattgaattggagcctgaaatccatttccccttcctccagcacgacgtcttccccttctttccagatgacttccgtggaagtggccgcattgtagttttccccgtcgtattcgacgtaattggagaaagaacctgccaggacgccttcttcaagggccccccaggaaatggtcgcttcaatcttccgggaagcggtgttgcggaaggtatcgtcccagatattgagggtggtggtgacggcggctatctggtcgtcactccagtcacgggtccccatccagtccgccggaccgtccccgttgccgaggagcgtgatgtggaagttcttggtagtgatttcatgggtggctgcccagcccatgggggccagggtagagaggcccgtcagacaggataggatagatagggtgagtttcatcaacacgctttataggaatcccgtatgcgtaaagtcaattagaaacgattgaaaatacaataaaaacggagtttttaataaaaataaaaatatgatagaatcctgccaggccccgtttttcctgccgcagattccccccggcaagaaaaatgcgactgcattccagtgcggcgcaatgcgttcttgtgaggggaaatcaaacgcgatagcgtaggaacgacctggtggtcaaagataccctcttagacttgtcacgcgcgtatggatcacgatttcagcctcatcttcacttttgtcggcggattgaccgccgctctccttttcggccttattgccagaaaactgcatttgtctccgctggtcgggtacctgctggccggggtagtggtagggccgtattcgccgggatttgtggcggattcccacacggtggagcagttcgcggagctgggcgttattctgctgatgttcggcgtggggctccattttcatttgaaggatttgattgccgtgcagagggtcgcggtgccgggagccgtggtgcagatatccgtggctacggtgctgggggtactggtgggctggatgttcggatggtccacgatttccgggctggtgttcggcatggcgatctccgtggcgagcaccgtagtgcttacacgagtcctggaagacaaccagaacctccatacgccgagcggccatgtggccctggggtggctggtggtggaggacctgttcaccattctgctgctggtgctcatccccgccgtgatggaggcgcgccagagcggtgccggggactggagcggcattctctacgaactgggctggatgttcgtcaagctgtccctgctggtggccctgacgctgtttgccggaaaaaaaatcattccgctggtgctgcgctacgtggcgcggacgggagcgcgggacctgtttacgctggcggtgctggtcattgctctgggcgtagcggtgtgctccgcgaaattcttcggcgcttccatggtgctgggagcgttcctggcggggatggttgtggggcagtcggacttttgcgctcgcgcggcggcggaggccatgctgatgcgggatgcctttgccgtgctcttctttgtttccgtggggatgatgtttgacccgatgtccgtgggggattgctggccgctggccctggcgacgctgggggtggtaatgatcggcaagccgctggcggcctatgcggtggtgcggtgcctgcggcgtccgctgccgctggcgctgagcgtatccgtagccctggcgcaggtgggtgaattctccttcatcctagccgggatggggctcatgtacaacattctgccgccggacgccaaccaggccatcattctggcggccgtcgtctccatttccctgaatcccatcctgtaccgccagattggccctgtggtcaagtggctgcaaaagcgcggcatcggccttacggatctgggcggagtgaacagcctggcgctcccgtcgccggacgcgcggcgcgtggtgctggtggggttcggccctacggggcgcattcttaaaagaatattgaatgacaacggggtggaagtcatcatcgtggagatgaacatagacacggtcaccgccatacgtgaacagggcggagacatcgtttacggggatgccagccagcgtgaaattctgcgccatgcgggcattgaatatgcggaaagcctgattctctccgcctccattccggatgccaaggaaatcgtgggggtggctctggagctcaacccccacattgacgtgatgatccacaccaagtacatgagggacgtggacgtgcttaaggaagccggcgcctcccaggtcttctcctcggaatcggaagtggctctgtccatggcggaatacttcctgcgggaaggcggcgcggacgacgaacagatcgtttccgaacgccagcgcatccgtgcggaactggacagggaagtgcccggagcttccgccgcggggcactgatgaccgggggcgctacttcttgcgggcggagataatcagcatcatggggcggcgcagctcttcctgcatgccggggacggaatccagaagttcacgggacggcttcggttcctccatggcggtaacctcaaatccgccggcggccagagcgccgagataggaagtaagcgtcctgtgatacttggtcacttcttcccccaggaaaacggcctgccgcggtccttccatgaaatagccgtccacgggccagtgcatgatctggccggattcatcgtaatgccagtcttgcgttccctgggcggtgaaaacgggatgctccacggagaaaataaaggcgccttccggcttgagccagcgggagacattccggcagactgcctggaaatccggcgtgtaatggaaggccagggagctgaggacaatgtcgaaggaagcctcgggaagcaggatatcctccatgggcatgcagcggtactcgataatgccttcgtttcccatggacctggctttggcgatcatctttgcggaaatgtccacgcccagcacggaggccgccccgtgctccgccgcataccggcagtgccagccgaatccgcatcccaggtccagaacgtgcttgtcatggaaatccggcagcagccgttccagtgttttccattctccggctccttccagccccttcacggaacggtccatttgactgtatttctgaaaaaagacgttatcgtcgtacttgttttgtttcatgatggggaggaaatgaacgttgcgtggaaataaaatgctgttttatttggccggtttcagaatgacggtaacgcggcccaggtggtgcagggcattttctatctggtcttccagttgggaggcgatctggtggcattcccggatggtcagggatgcatccgcggagcatacgcaagtcagggtggggaaattgtcctcccgtgccaggtccagcttgagaaccttgcagatattcctgtgctgctggaggataaggttcaccttcaggcggacttcctccggcggaacgtgctccggaatggcgttcgccttcatatcgcggcagtccggctcaatgcggcagatcaccttctccggcttgagcgcatgctggacggaatcccggaacgccttcaccacatggtagccgcgctccagaggccagtccgcgggaatctccacatccatgaaataacagggagcgtgtttgccgctgcctgcatagaacccgtggatgcggacatggtggcgcagggccagccggtggacgaccgtgtccggctccatgttggaaaaattctcacgggccggttcgatatggacgatcacgtccgcttccggcagctcgtacttgacaatgccttcgatggactccgccacatcatgggcgtcgtccacgtgcaactccgcgggcgcttccacgtccagctccacaaaaatgcgggcgccgccgtcacgcagacggatgcgcttgaccgggtaatccggggcgttcttcttcatggcggttagaacctgctgcgtcagggcggaagaaccgccgtccatcagggcgtgaatggaacgtttggcaaggccgaaggccacggaacaaaccagggccgccacaaacagggctgcgatggcgtccgccttctccagcaagccgtgccagacggaatctgcgggaaccaggtgcgccagccatacgcagaaaaggcccagcagcacgacggcggaagaccagatatccgtggtaaaatgaagggcgtccgcttccagcgcctggctcttgtgcttcttggccacccggcggagcatggcggagcggttcacgtccaccagcagggaaacggccaccacggcgaaggcccaccaggtgagggtgatctccgcctcattgtaaaacagccggtccacagcctcccatacaatccatgcgcaggtaatcaggagcagggcagtttccgcaagcgcggaaagattctccaccttctcatgcccgtaggggtggctctcgtcggcaggacgggcggccaccttcacggcgtaaaaagtcatggccgcagccatcaggtccaggccgctgtgcagggcctcggaaatgatgcccaagctgcccgtcacgataccggcccagagcttgatgcccgtcaaaaaggcggaccacaggacggaggaaaaggccgcatgtgatttttcttggtgcgctgcttgttccataagacagagaaaaggaagaggagcatatctaagcccgcctccctttcttagtcaatgataacacagacggcgttgaacttcggtcccgttccatgacggaatagaggttttcccgggaaaatgcgggacagaatatcgcggatacttttaatgtttattattatcttgaatattttttgaatggatttctaatcaagccggaacatgccgggcgtgtggcggaaatccttttttcccgtgtaaaaatgattacggaggttctttcaacaaggggaaatgccatcctgtcctccctctgatggactgtgtcaggaaaaggcggagaaggggccggcaaaagtggttatgctccacgtccggatggtcgtgacattttccgaaaatggttctaaaagatcaaataaagagggttcggtttattgaaataattgatatatccttcacatcatattaggatacatcattcagggtaatgatatggatcatgttatgaggtgttctttatacatttttttaatagcagtttcaggcgggataactttttcggaaggggcgaggcgaatgattgacccggttgggcatcctgtgatggatttatgggagcccctcaaccctggctattccgaccggaagtatcctcccgtcaatggaagatggattgaacaaaagttgatcgaattcaatgatcatcaatatctgcaatggaaactgattcttaattgtgaagaatggatcgacgcgcgccgcggaacaaaccggaagcagggagaggctttgaatttcctgtccggattctaccccaaaaaggattatgatgaaacgaacgaccgggaatggacggacattcaggaatatgcgttgtgcatttacacctatttcaccgcggatgggaaaatctgtgaccttgacgatcagggctatcacatgcgtgtggtggaagagaataggggacgcaggtgcgtcactttttatggtgtacggggagaagatgccctttgtgcaaatggttaccaccggggagaggttatttgccaggaaggggcagggattctcaatggtcctttcattttcagggaatccttttttggaaaaggagatgattcaagaagtgtcgtaagccaggagcctgtggatgtggaacgtccggctatttttccgaaaggacgaatgatccgttaccatcagtacaaggcaacgcctgccgtggaggcgggcgttgcctgcctggaagttcatcaaggatgggaagcggaattgacggcttccacaagaaaaaccttttatttaaaagaaagatttggtgattggaacgatatcgatcaattgcggttacttcttcctgaagatttgcttcaagcaaagtattatctggacccttatgatgtagctgaagcggaatatacggacaagtttggccggttgactcgtggccttcaggggtgggcccggcgttgtgcagaccattatgaacctgggagtgatttgggaggaggccgcgccgtgaaggaaatccgctattacgacgaaaacggagagttaagttccgatcatttaatgaagtgtgctattatccgtttttcctatccggaacatggattccagcagatcagttattttgatgagcatggcagggaattgaagcattttcaaaaagcaagggaagggcctttggaaaaggaagagccatatagttattattccatgttaaacgaagatattacctgctatgagcccgacaaccgggatgaaggggaaataatagagcgtgaggcggactagcggagagaggataaagcggtcgtccatcttttcctggagatgctcgcgctttcatcaaattaaataagacgggcagtctttccgtagaatgattactccagattgtgggaggaattgtttatccggttccctggggtttgcttccatgcttccgtgacctaaaaaagtattgccaatgctggggaatacgttattttgcgtgtgttgagagtgactgccaagcggtagccggagccccttaagggagtgcggcgtgttccccggcagagtatccggtccctgtaacctatttacggatggccgcaccctgattcccttcctgcgtggtatttgcgaaagacaatgtgttcgcccgggttgaagaacagttccacttgttagtttgtctcttttcacatacacttactattattcccaattctatgtcaggacataataaatggtctaagatcaagtacgttaaggctaaggaagatgccaagaagggcaaggtgtttgcccgctttgcccatgaaatcatgctggccgccaagagcggcggcggagatcctgatctgaaccctcgcctgagggccgccattgacggggccaaggccgtgtccacccccaaggagaatattgaacgcgccatcaagaaaggcaccggggaactgggcggcgccaccatccaggagattacttatgaaggctacggcccggcgggtacggctttcctgattgaagtggcgacggacaacacgaaccgttccgcttccgagctgcgcactctgtttaccaagaacgggggcagcatcggcactcccggttccgtggcctaccagtttgaacgcaagggagaagcccgcatcatggcggaaggcctgacggaggattccgcgatggacctggcgctggaatgcggcgcggacgatgtggagcagggtgattccgacaatgaatgggtgtttgttacggacccgacggaattgaacaatgtgtgcgccgccctgcgcgaggccgggcatacggtgatttccatgaagctgatttccgtggcgcagaacgtttccgtaattaacgatctggagacggcgaaggccgccctgcgcttgtatgaagcgctggacgattacgatgacgcgctgaacgtcttctccaatttcgacgtggcggaagaaatcctcgaacagcttgactaacgccgttgtctttcaggagacgcctgttgttgcagtccaattttcttttccatgtctgatacccccccagatttgactccggaacaggtttctccggagccatcgcccaaaaaacgtattgtccgcagagccaagtctgcggcggaagctccggcagagtcccacgccgctgcggaagtttccgggacggaacagggttcttccccggccccccgcaagcggacggcaaggaagaaggttccggaattggcgggtgaagggatggagagcacggatgcgccgcagaagaagagcgcccgcaaaagcagcgctgaaattccggcggcggaagggacggaggaagctcctgccaagccccggcgcggacgtccccgcaagaagcccgtggaggaagttccggaaactgccggttcccctgatgttcccgtaacggaagctcccgtcaagccggtgcgcaggcgttccgccaagaccattgtgcctgaagacgatgccgcagagggcgccaaaacggacgctgccgtttccatggcgcctgccgaaccggccgccagtcctgcggattctgctccggaacagtccgaaggaggcaggccgaaggtgatccgccagaggtttgtgagaaaaccgcgggtacaggagacagggccggatgcggattctgccgctccgtccatcaaggtggtacaggaaggcgcgacggatttctccggagatgccgcgcgagaatcccatcggacgaatgaaccgcaaaggcagcgttttgagagacagaaccgccgcaataacaacgaccgtttcaataagaaccggaataaccggcaggacggccgcaatggcaggaacggcaatgaccgggttaaaaaccgctggaacaataatcaccaggaggggaatgctccccagaataatgctccccgtgagctggcgcccccggaaccggtggacggcctgctggaaatcacgaataagggattcggctttttaaggaagccggataatgattttgacgcttttgcggaagccgtgtacgttccgcaggacatgatccgcaagttcggcctgcgtcccgccgtttgggtgcatggacaagcctgccgccatgaccgcggcattcttctgacggagatatccgccgtcaacggagatgctccggagaaggcccgcaagagcccgcattttgaagagctcaaggcggtcaatccgaataagcgcatttcctttgaaacccgtccggagcgctataccacgcgcacgctggacctgattgcgccgatcgggcgcggccagcgcggcctgatcgtttctccgccccgcgcggggaagacgacgctgctgcagcacatggcggaagccattctggagaattacaaggattccatccacctgatggtgctgctggtggacgaacgcccggaagaagtgacggagttcaagcgttcccttcccggagccgaggtatacgcttcttccaatgacggcagggtgcgtgaccactgccgcatggcggagctttgcattgagcgcgccaagcggcttgtggaagccggccagcatgtcttcctgctgatggattccatcacgcgccttgcccgtgcctataataacgcggacaaggggagcggccgcaccatgtccggcggcattgatgcccgtgcgctggaaatgccccgccgtctttttgccgccgcccgcaatacgcgccaggccggttccctgaccatcatcgccactgcactcgtggaaaccaacagccgtatggatgacctgattttccaggagttcaagggtacgggcaacatggagcttgtcctgaaccgccgcattgcggagcagtatatcttcccggccgtggatatcctgaaatcgggaacgcgccgggaagaactcatcatgccggaagcgtggctgtacaaaatgaacctgatccgccgcgcgctggcggggcacaagcctgtagaggccatggaacgcttcctgtttttcctgaacaagtacccaagcaacgcccagatgctactggacctgaagcagaaggcataagctgccggaatgatggggcgaagagctccacgcaggatgcctgccagggaatattttcctttgactatacaagggcgttttcaaacgccctttttgctgtcccaaatggcgatgtgcaggcggtctgaaaagcggaggccataacggaggcaccattccaccgtctgcgcgcgcatggcgtccagctctgcccgtgtggaggccagtggcatgagcaggatgcgttctgcgggaatgtctgccccagaagcctgccgcagggcggtttttacatcttcctcgcacgccactacgaatttgaaccacgctttttccgtggaagccagacggcgcaggacgtccggtttccatgttctggcggtttcattgccggagtgggggagtttgggagacacgttgaattgcgtgatgcgttccagcagttccgcatccggcataatggtgccgttggtttccagctccacggcatggtccggcagcaggcgcagcagggcgggaagggctttttgctgaatgagcggttctcccccggtcagtaccaggcggcggcatggataacggagcgccagttccgccgccttttcaggcgtgagccgcactccgggaactgtcccgttccaggagtacgccgtgtcacaccaggaacaggccaggttgcagcctgccaggcgcagaaagacgcagggagtcccctgggagacgccttccccctggatggaatggaaaatttccggttgtccgtgaagctgggccagtgtgagcatgatcaggcaggcctgagactaccatatccctgccgcccgtcaacgcctccctgcggagggctccggaagagcggcaaacgggacgcaggagcttttcttcattccgtgccctcaagttttcaggaacacgctcagccgttgctgcggcggaaggcccccaccgtgaacaggaggaggatgaatcccacaacggaggcagcgcccgtgaacagcttctggaaggaggcatggtccttttcctccttctccagcttttttacttcttctctggaagacttgcgcatttcagctcgggcctcgtcataggtccgggacgcctgttcctcttctttccgggcttgttccagagcgttccggacggctttggactgctccctgtatccggctgtagccagcaaatcgtcatctcccgggtccggggcggcggtttcttcccggtcatcgtcggttaaggccttgtttttctgttcggtgagtttttcctccgctttctgcatcagtagctgctgcttgccggttttttcttccagggcttccagggcggcgtccagagcctgcatttttttctttgtggcggaggttttcaggcgaatgaaggctatttgcgattgaagttccgagatgttctccttctggggagcggctcctgaaaatttctttttggctttggcatcctcccggttcttggccagttcccgttcggcctgccccagttccgcctgaatacttctctgcttgtcggccaacttcgcaagcagggttttcattccctccctcttttgaagcagttcttccctggcggacttggagttttccctctgcctgctcatgcggcggcgcaactggtcaatcctctggtcgtgttccttcacttcctcctgctggtccgccatgcttttttggtaggcggcaacctgggcttcctgctgctgctgtcttttctgctcaagataggtttcccggaatttttccatggcctcttccgccgtccgggtggcgtcctgggcttcatccagtttcttccgggtctggccgacggttttctccaatattacggcctcctgttccatggctgttttccgggcggccagttcctttccttccggggagatatggtgttgatagtaccagacggagaatccggcggttaaaatggtcaggagaagcagtacatagcgcatgagagtgttccaacgattcgggtaaaagtacaaaaaggagtgtgccttgtcaacatggcagaaataaaggcaacccgcctccctccggaaatggagggaaagcgggctgcctggaaggcgggttccggaagagtccggaaatgagtctaattcctgttaaagattcagggagaaggcggagatggcatctatctcttccgcaatcttgttcagcagttcatcggaaacgggtttgttggtcttgaggacggccagggcttcccgcgtggcgtgatcggccggagcggcgatgttgtcaatgttgatgccgttggagtacagggcggaaccgatggtggcgatgatgccgggacggtccttgtaatgcaggaacagcgttgtgccgcgcaggtccgcatacagcccgttgaagttgttcaggcgggagaccatgggaatgccttccgtcaccacgccgcgcacgctggtgttgaaatattccccctcatcttccatcaccacgtccagcgtgatggaatcttcatagggcttgtcgtccttgggctcccgcgccttgaagacgatgccgtgctcccgcagggattcttccgcggcggcgggcatgaggcccttttccgcgtgcggcagcagcccttccagaatgggggcagtgaaccatttgcggaagacgcgcaagttgccgtagaaggtgcattccacccggcggataggcttgttgcctccggctttgcgggccagggcagcgagcaggaaagccagttggagatgggccggattgagaccgttgggggattccccgttcaccacgcaggaggtgtctccgtcagagaaataggccaccatctgttccgcggcgcgcttggccgccttcgtgttggcttcccgggtgttggcgcccaggtggggaaggatgaggtccgccacggcggcggaaggtttttctccgggcgcgtccttggggtggacgtccgtcaggtagccgatgtttttgcccgcggccttggcggcggccagcgcttcttcatccaccacgccgtagcgggagcaattgatgagcaccgcgccgtccttcatgctgtcgataagttccgcgttcaccatgtggtgggtggagggaccgcccggaacgtgcagggtgatgatgtcgcactgggagaagatgtcttcaatgctggtgggggtgacgccgatgttcagggcgcgctggcgggccagaaagtggtcgtagcccagcagggtgggttcaaatccctggaggcgcttgacgaggttgcggccgatgttgcccaggccgatgatgcccacggtttttttggtcagctcgctgcccatgtattttttcttttcccacaggccttcccgggtggtggcgtccgcctggacgatgtggcggtaatacgccagaatcatggccatgacttcctccgccacggcgttggagttggcgccgggggtgttcatgacgtccacattcttcttgcgggcgtacacgatgtcaatgttgtcgtagccggctccggcgcggatgaccagcttcagggaggggagggcgtccatgattgccggagtgactttttcactgcggacgatcagggccacggtgtccggatgggcggcggcctgttcttccagaggcgtgtcggcgtcctggacgacttcatagccggccgttttaagcgtattggccgctacgtcggagagtttggtgggaataagaaccttgttcatgttggtatggtggaaaatgtcattgttcaatggtatggacaaaaagtccgctgcgcagcttgggctcaaaccacgtggacttggggggcatgatttccccggcatccgccacgcggaagaggtcgtccatggtgacggggtacagggagaaggccagcgccatttctccggagcagcggcgttccagttctcccaggccgcggatgccgcctacgaagtcgatgcggtcgcttgtgcgcggatcgtcaatgcccaggatgggggccagcacattcgcctggagaatggcgcagtccaggctttcgatgggatggtccgccgggaaggttcccggtttggcggtgagggaataccaccggccgtccagatacatgccgaatctgtgcttggcgcggggggcgtagccttctccgggaacggcgtccgcaggcgccacgtcaaaggaggcgcggagcttttccaggaattcttccctggccaggccgttcaggtcgcgcacgacgcgattgtagtccatgatgaagaggtcttcatcacagaagacgacggccatcaggtaattgaattcctcctgtcccgtgtagtccgggtgctccttgcgccgcctggcggaaacggcggcgctggacgccgtacggtgatggccgtccgctatgtaaagagcatccacttcttcaaagcctttgcggatggcttccaccgtgccgggatcggagacgggccacaggatgtgggtaacgccgtcgtccgtggtgaaatcgtactccggtttgtggaatttgatccattcccggatgatgccggaaaggccctcgtgcttgcggtaggccaggaataccggttccgtctgggcggaacaggcgtcaaagtgctcaatgcggtccagctctttttccctgcgggtcagttcatgctttttgatgacgccgctggcgtattcatccacggaggcgcagccgacgatgcccgtctgcacgcggccccacatgatctggcggtaaatgtagaaggaaggtttttcatcccggacgaggtagcccttgcggacgaatgcttccaggttttcccgcgccttggcataggtttccggggcgtggatggaggtttcgctcgtgtcgatgtcggagcggcagatgtggaggaaggaggcgtcgtttccggcggccatttccctggcctcccggtggttcatgacgtcataggggagggaggaaacccgcgcggccagttcccggggcggacggagggcggggaagggatggagtgtggacatggaaaaatgagagagtacagaaggttaatgacggagggtgcaatgatatagcgcacggatgccggagacaagccccgccaaaatacatgccgcaatgaacagcagcaggtaccgcatgggcgctcctgccgctttgagaaaatccaggggcttgaacaggagaagccggacaaactctccgcctcccggaatgctgttcaacagcaggagcatcccgatgagcagcaggaacaggcttgccgcggcggccatgctccatgtgcaggagcgtgccatttcccccgcctgttcccggtccaggcgttttttcaccaggatcaggtagtacggaacaagcattagaaagaaggctccggaccaggggcgcatggcttcattcaaggctccggcgatgatgagggccgtcaggacgcaggcggaggcgatgatgaacagagcctggagcgccgtgtgaagaaccttgttcatggcggctgttccgttcattctccggaggaggcgttcttccctctttcccgggcggggccggaaaagagggaagggaaaacgcttacttgagtttcaggatgtccacgatgttggacgtgatggagcgcatgtcgtccatcgtcagctcacccatgtgggcgatgcggaaggtcttgttcttcaaatccccgtaaccgttgccgagctgcatgccgcgttcgatcagcacgttgttcagggcggcgatgtcaatgtccctcgtgttgctgatgaccgtcagggtgcgggaaagatggtcccggttggcgaagacgctgaaatattcatccgcccaggagcgcacgaattccgccatggcttcatggcgcgcaaagcggttttccacgccttcctgcatgatgcgctggagctggaggtccatggcgtacatgatggagacgcagggggtgttcgtgtactggtagtcctttttctggatagtgtcgtaaatggagcgcaggtcaaagtagcaaccgcggttggggacggaggcggtgcgttcataagccttttgggacagcgtgcagacagccatgccgggggggagcgccagcgccttctgggtggaggtcaccagcacgtccacgcccagcctgtccgtttcaatccgggagccggcggcggaacttaccgcgtccatgcaccatacgacgtccgggtattttttgagtacttccgcaatttcctccaccgggttctggacgccggtggacgtttcattatgggtgatgcagatagtgtcgtacttgccggtggagagggcgccgtccaccatttccggggtggtgggctggccgagttcgctcttgaaaatgtcggagggaacgccgttgcccgtggcaatcttgtaccatttgtcgccgaaggcgcccacggaaaaaatggcggctcgcttggcggtgcaggaacgcacggcgccttccatcaagcccgtaccggaggaagtggagagcaggatttcctgttccgtcagcagaatgcggcgcagattgttggaaatgcggcgctgcagggcggaagccgccttggatcggtgccccatcatcgggccgctcatggcggcaagtacttcaggtgctacttcagtgggtccgggaatgaataatttggttgccatttgttttaaaaactgggtacgtgtactatagcgtctccaaacggtttggctatgaatttttgttggggcaggctgggaaaacctgccgcagcagcgggaataggagcggtttactgcccggatccgccgggaaacgaatgataaatccggaatcaggggctgctttttatctcaaggaactcatgttgagtagccgtttctctgttggaaaccgttccgttgcggatgaaacggcctttttgcttccgtacggggaggaaacgcggatgcatgcttcccccgcaggcgaaaggtctttaaagtttagaagctgatgagcttgaccagccagtagccgccgaagaagagccagacgtacaggaggcccgcaagcaggaaggggcgcgctccggctttcttgaacttctcaaagctggattctgtgcccagagccgtcatcgccatggtcagcaggaacgtgtccagggtgttgatggcgtccaccagttcggcaggcagcaggtgcagggaattgaagccgatgacggcgaggaacaggaacgcgaaccaggggatggtgattttacgtttttcgctgtttcctccggcggcggagtcccgccgcgccaggatgatgctcaggatgaccagcaccggggccagcatcatcacgcggatcatcttgacgatgatggccgggtcggagatggcctgccccatggcgttgccggcgcccaccacgtgggccacttcatgaagggtggctccggtaaagaggcccatctgttccgtcgtcaggttcagcattccggcccggtacagggccggatacaggaacatggatagcgtgccgaagatgacgacggtggaaacggccacggccgccttgtaaggcttgcttttcacgacgggttccgcgcccaggacggccgccgccccgcagatggaactgccgatggaggtcagaagggccgtgtcccggtccattttcagcagccgccccagtcccgcgcccagcagaatggtgagagagaccacaatgaggtcgatcagaagagccgctcccccgatgtcgatcacgctctggaaggtcagcttgaacccgtacaggacgatgcctgttctcagcacctgcttggtgcagaactggatgccgggcacccacgcttccggaaggtggttgcgcaggctgttggcgtaaagcatccccagcacgatgccgacgatcagcgggctgaaggagaggtgtttcacccattcaaagtccgcaatgtagaaggcggaaaaggagaacaggacgatgagcaggatgccgtggagcggattggcgagatgtttgggggacatgggctgtagaatgatggctgcggccgcccgtcttgtccggagggggaacgtgccggaacggctgcgtgggagatatactccacaatcatcataaaatctaatcagaaattgttataggcgattagattttgttataataattccggcagaatttgatgaataattcattgattctgctgtagtctccgtgcccgttggcaaagtgaaaggaacggcggatttccagatggcggagatggatttttttcaaatccccgcgtttgagctcttcccgcacggcgagggaggagagaaaagagcatgccggggaatgcgccagatacatcttgatgctttccgtattgcccagcgtcatcaggacgtggaggccggaagcggcgattccgtgtttcttcaggacttcctccaccacccggcgcgtgccggaccccggttcccgcatgatcaggggaacatgggagagctgcgggagggagaggccttcccgcggggcggcggcatgagaaccgcccgccagaatgatttcatcctccatgaagggcaggtaatgcaggtccgtgcgccttgcggtgccttccacgatgccgagctgcacggcttcatcctgcacggcctgttcgatttcctccgtattgccgcttttcagccgtatgcgtatttccggataatggcggttgaacagggccagcagcggaggcaggacgtactgggacatggtggagctggctcccaggctcaattcaccggaaacgggcgtattccggccggaagacatgtcttccgccagcgtttcatattccttgaggatgcggcgggaatggaccagcaggcgcacgccttccgccgtcagggcgatgccgcggccttcccttttgaacaggcgggcgtccagcaggcgttccagctccttgatatgccgggtgacggccggctgcgtgatgaacagctcctccgccgcgcgcgtgaagttcaggcgccgcgcgacggtctcaaacactttcagccggaaatccgtaatcatggagaaggcatgcattcaaccacgcctccgcgttcccggcaagctcctttccttcatgcggttgcccgttgaaaagaaaaggccgtgaaatccggatgatgacatgatggcggctcgtgcggggaagccggaaggaagagaacaggagcagcatgggcatgagatggcggattatggccgcggcggcattttgcgtggccgggtgggcttccggggatgtgccgtccgatccttccagggagtttttactgccttccggaacgttgaaggcgtttgccgaatatataccagcctatggaaaaggtgcggttcctggtccggaggagacggagcctgtccgtctggaacaagcgatagacgccacccgggcggcaaaggatgcccgtgcgctgaaggaagccgccgccgcactggacgcctattggcagtcccggctggatgctctttatgctcccgtagccgcctggttggcttcacggtggtttgtaaagtcggaattgattgaacatcaatcaaagtggtttaaggaaatgcctcttcaggaattgcaggatgaaatagtgatggaatcctgggtgcaggcgcaggtggcttgggaggcatttttaagagcggatgagaggttttacagggcgtggatgctggccgcccaaaaccggcgctctgccatgaagggggagggcgtacccgatgccgggtcattgggagagctggaggaggcggaagtccatgtgcgccgggccttcaagaagatggaacggatgatggctattgcggatacggcctgcgcgacgaatgcctacccgctggtagacgttgcgcccgtggatcccggctggcaggagaatgaccccgtgctgcaaaaggtggaacaggccgtttgttcttctgaatatcccttcgtcaagttcctgctgggctcctaccggaattactggaaggcccggttgtccggtatccggacggctttcttgccggagaatggctgcagtttcatgcgtaccggatgggaggacaggctccgggaggcggaccgggcgtggcggcgttatgtggttttttccgtggagtatgaaattcagcccggcatttatttctggagttccgggataggcatttacatgacggcgcatgagtcgtggctataccgccagaggtgccgggatttgctggccgtcgcggggctggtaccggagagaagatcagagggcttcaccagcccggcccggaattttgccggctttggggaagcgcgtctgatcgcggagcgcatggcagcagccggaggatcgtccgctgcggcttaccgaaaattgtctgaaaacctggaaaggctgcgcacggatttattcagttcggtttctccctggccagccgtttttttggccgtggaaacgggggatgagagcatgcttcgttttctgatgtcccggcttcgcctgtccggggaggatatgcttccgggcggtacgacgactcccctgatgaaggccgttgcctcccgatccgttcccctggcggatattctggtttcgtgccgggagctgctcaatgcggtggatgccaggggccgtacggcgttggacatggcgctggagcgcggggatggggagatggccgcgttgctgcggcgtcacggaggcatcaccggagaagaacggaaaaaggagagagaacattcctccccttcctctccgcctgcgtatgactgagccggagccgggaacgtttttcagagctggtgcgggaggtcattcccggcaggtttttttgttggaaggggaatggtttttgttaatgccgccttacctgcccggagcatgattgtccggaatattccggagggtgcaagggctggaagaggtcccgatggtttccggcgtgcagcaacgcgttcaagacggagataagacaaacgggcggaagttctgtcattcataaacgtttctgtttgaaaataagtgaatttggaaagttttcacggcacagtggaagttcccggaaccgtgcatcgtctgaacggaacgagacgggagggaatcaaatgcctatatgaaactgcattccatgatcattgtcggcggagccggccttttgctgttgggggcctgttccccttcttcctatcagaccacgttcccggaaccggcctatgtgaaggtttccaccaataacggagcctatgcgccttatccggacaaccccatcggccagcaggaactggtgtactggtatgattcccttactacccccatgacggtggtggcggaagtaccgcccactcccatcgtcaccaagggccccggcccggtgatccttgattccaacgatttctccgcgaagctgtaccgggacagaacggaaatcaagaagaaggacaaggatggcaactgggtcaccagcgtgcgccccaccactcccgctgaccagcgcatgaggaattatgtgatggcttccaagaaagcccgttaatcttttcctccgttaaattcaggaaaacctgtccggcctgctttcctctccggaggaagcaggcccggcttgtttacaggcaggtttttcttcccattcatccgcggaaacgggacggcggcgaacgcttttccccggccatgggaggtaggcgtccgtataaaaggaggagccgcagccccggcattccagcatgatgcctgtatccggccttccctgttcctccggcgtctgcgaggcggggcgaagcccggcatgcccgcagtgtgggcagcggatggggagaggggcggcatattgaatcatcagaactgccgtgcagacgagcgcccaggcaatgtaaccggcccagaaaggccattccggattcagcagccagattgccgtgacgacgggaatggagcacatggcatatagcagggtgctcttctgcctcgtggccaggaggtggaagcagtagatcgtatcctgcatgaaaggggggaaggaaacggttacagatccttcagggtccattcatccttccattccagaatgatctggtcgccgtcccatttcatgggaagccacatgtggcggccgtcaatggcgtttttgggccgccagatgtccgccatgaagatgaatttgccgggcttgccctgtacgggcaggatgtaggtgctttgtccgccgaaggtgatattggccttgggccctacgcagggatttttgagctccgtccacggtccggccatgcggggggccacggcgctgcgggccgcgttgggcgcccagccggagcagccggaggcgatcatgtagtatttcccgttgtgcttgcagatggcgggagcttccatgtagcggttgacgaagacgcggacgtattttccgttatgcccggtgtagtccggcgtcagttccgcgatgtgcagggtgatgttcccttcggaggagtaaatatggtaggccttgccgttgtcgtccacaaagatggtcatgtcacggctcatctggccgccggggaagtccctgcggatgatgcggacatagtcaggcatctccttggtgaactcggtcgtctggtcctttttgtccagattcaggggccatttgcccggattgacgcgcccggctttcaggaacgtgaacggaccggtgggctttgtggccgtagccacgcccgcgtacgcggaaccgtagcccttccccctgagttccaggtggaaccacatcacgtactttttggtcttcttgttgtagaccaccttggggcgttccaggatgcagcccttggcgatggggtgggagttgtccccttccaccactttcagggcgattccctcgtccttccagttgtaaaggtccctggaggaatagcagtgcacgcccacctgggcgcggtttccggcgtccccctccaccttgtgttccccgtaccagtagtaggtgcccttgtcgtacagaatgccgccgccgtgggcattgatgtgcacgccgttgttgtccgtccagatttcaccgggcttgaaggacgtgtgccggaccggcgtttccgcggtggaaacggcggccgcgccgcagaacaggcagagcgccagaagggatttcatggtgtttgtcatggccggaatggtgtggaagtaagggatgaaggcggttccggctgtccgtacagcttgtcccacgcgcgggaaagggcgtaaagggcgtagccggtgccgtagaatttgtgataattgtacagggggtaatcccaccaggaaccgtctgttccctgacgggtgaggatgtcgtccgccaatagagacgcatggcgttttacctgatttggggccagcatgtccagacacattcctgaataatagtatccgtagtagaaaaagtagccggaattctgggcgaaactttcatggggagtgggcttgtgcagggccatcgtcagccatccccggcggctccacaggcggtccagtccgtccacgagctggcgcagggagatgtcctccggctcccagagcctgatggcgtagtcacaggcgggggtgcgtgccaggctgccggtgtggcggttgatgggccggccgggatagaaggcatgccccagggaatagacgtaggttcccgccggcgtcctctgggatttgaggaacttcaacgcgcggctgaatattttgttgtccagcgacaggccgaatgattttccggccatccaggcggagataaggacggttcccgtcaggaaggaggtaggctgcgccgcgggccgtttgctgaagccggaataggtgaggtagccccagccccccatggcggaagccagctcattgagctttttcacctgggagccggcgcagcttttcagctcccggtagcgcgggctgttccggtccagtcttgcggcccgcatgctcatggcgtccagcacgtaggtatgcgcccaggtgttgtacacgcaaagggagtcgccgcgcttcaaatggggcatcgtacggatcaggtagttttccgcgcgggtcatggcctgctgcacggcgggttcgttgtgcagggggctggcgttaagccccgcaatgcacagggcggtgcttgccgtcttgaaggtgagcgggccgtccggataggggcagaggatgttccaggtgccgatcacccggtggtcgccccaggagccgtccctgttctgcgttttcagcaggaagtctacgccgcggcggaacgcctggtcaaattgttcggatttcgcgggcgggatgtccgggattttggcgatctggatggcatccgccttttccgcctgcgcgggtttcccgtgcgctgcgggaagatgcaggcacagaatcgcgagaaggctggtcgtcagcaggcggaacatgggtcaggaggccgttgcggcattggaagggtacagggattccctgacgcgggagacggcgtacagggcatagccggtaccgtagaatttatggtagttgtacaggggatagtcccaccaggagccgtctttttcctgcatgggcaggaggtcgcttgccagatgggaggcatggcgcgccagatgttccggggccacttcctccaggcagcgggcggcgtaataatacccgtagtagaagaagtagcccgcgttctgggcaaagctttcatggggaatgggctttttcacggccagggaaagccagccgccgcggctccagatgcgttccaggccgtcttccaactgccgcctggagatgaaagccgggtcataccgcatcagggccaagtctccggcgggggtgcgggccagactgccggtgtggcggttgatgggccggccgggatagaaagagtgggaaagggaatagacgtagctgccggcaggggtccgcagtttttccaggcaggcgacggcgcgtttgacgactcgggcatccggcttgaggccgaaggcctgttccgagtccttgtaggcgagcaggaccgtagccgtcaggaaggaggtgggctctccgatgggacgtttggaaaaggtttcaaacgtataatagccccagccgccctggacgtccgccatctggtccagcgccttgacctgaaggccggccactttttttagttccgcatacaggggggaatccgcaggaagattgcgggccgcccggctcagggcggagaggccgtaggcatggccccagacgccgagcacggtgcgcgtgtctccccgtttcagggtgggcagcgtggttagcaggtattgcacggccttgtccagcgcggccttgacggcggggtcctccttcagggggctggtgagcaggccgattacgcacagggaggtggaggccgttctgaacgacctgggcccttccgggtaggggcagatgacgttcagccccttggtgcgcgtatggcttccccaggagccgtccctgttctgttccttcagcaggaagtccgccgccttccggatggaggcgtccagggtttcccgggagggcggtggaacgtccggcaccctggcaatgggaatggtatcccttttttccgcgttttccgccggaatggaggcgcagagcgccgtgctggcccccagggcggcgagaaaaaagacggctttattcatggaggtccgtagggggatcaggcctgctggtccttgatggtgacctggacggggaggccgggagcgaagatctggctggcgggaaccttgggcgtgatgatgatgcggcgcttgccgtccgcccccggaatggggctggcttccgtaatgacgccgggaatctgcatgttcgttaccttgatgacgacggcttcccccaccttgggcgtggcggtggagtccggcagcgtggcctgcacgatcagttccgagttcggcgggacgatggtggcgattttgtcaaaggcttccagcttgccgccgggcttgagcttttccgccaccggaatggctacccatttgtccgccacatagccgccgtacagcaggatgccgttttcaggggccttgaaggcggccatttcccggtccgctttcagttcgttgtatttgtcctgaaggcggcgcagggacacctccgcctccgtcagggctatctttttctgttccaggtcaaaatcagcctgcttccgggcctgttccaaatccatctgcttttccttgaccgccgtggcgtagtcttcccccaggcggtggatgttgcgcagcttggccagctctgcgactagcttggctccctggacggcaaattcgctttcccccagttcgtttttcaggcgcttgaggatgatttcttccgtttcctccgccacctggtcatccttgtacatcttggtaagctggttcagctcctcctgcttgtaggacatgtggcgcagggccttgttgacgcgttcctcttcttccgccagcatgcgggccttccgcttttccaggaagtctttctggtcctcctccgtccgggtcagggccgtctggtatttttgcagagccagcgcggagcgttccttctgctggtccagggcgtaccggagtttcagcacttccaggtttttgctcttgatggtgcgttcgtagtcttcaatgctcttgtccaggatgcggaagtccgcctgcgccacggattcccccttcttgacggagctgccctgcggcatgatgccgagcaggaaaatgtccgagctccccttgggggagaaggaaatggacttggtgtttttcttgggaagcaggatgcccggggcaatggaatccgccagggcgggaattccgatgagcagggcggccagaagtccggccgttgtaagagttgtgcggttcatggtggcaggatggaatcaggattgatgcgcggaaaaggggacgaagcgccccttctttccaagaataacggtgtgaaaagtggttttctttcctttatgtgaggcaggcacggcctccgtgctcagttcaaaacccgctttttggagtgtgcgggcaagccggacgtccggccgggccacggtgatgaccagcaggccgccctgcttgagcgcggcaaaatagtcggaagcctccgccacgctcaggttcatgcgttcatgcgtggaacggcacaggatggcgtggaagcttttcgggtttttgcgggcgatctggagcgccggagtgaattccacgctgacgcggggatcgtgcaggaagccggggcgttccccgtccatcagctcctggtgccagtcaacgagcggcttgcagggctccgctacgatgaagcgggccttttccctctggaccaggtccatcagggcaaacagggtgaaccccaggcttaagccgtccaggagaaaagcgggctggttggcccttttaaccggggctgccgccatggccgccgccgcttcattgctcccatgggaaaaactggacgcgagctgcacgccgtcacgaagaagaaaatggaagccgtcccgttcccagaggtcgagaatggaaccgtcgggcaaggtggtggaagctaatttggtaatgggtttcatatgaaataatgccggatacacagcgtaggaaagaacgcttttcagggcaagtccggacagcgtgtttaggatggaatacgctccaaattaaaaaaaattgcatggaatttgggctttgcgcattctttttcttgatttacggtcggaaataagcgagagctatcgttcagcacagctattttttccgatatgagtaatccacctcccccctccattccgggcggtactccgcctccgcccagcattccgactccgccggccgctccctccgtgcccaaggcaccggcggctccctctgtccctcccgcctccggcgctcctgcggctcccgccgcacccgccgcgccgcccgctgctgctgcgcccaccattccccttcgtcccgccgggctcggcggaggcatcaagcttggcggcggtttgaagacggttgctctcggctccgccacgacgcccgtggctcctcccgccggtgcggcacccgcagccgctgcgcccactgttcccctgacccctcccggggcaggcatggcgaccgcccagcttccgcaggccaccatcgggctgaataccgctcctgcggccgctccggtttcttccgcctcctttacggccaagaagtttgaagaagatacggaagcggcccccaatacgctgctcaatattctttccttcgtggctcttgcctttgcgcttattttcgttggttatcaatacgccacggataccctggaagcccgcagcatgacgggctggctggggagcgactccaagcccgctgccgcggctcccacctccgccggtgaagaagcgaccgatgacgcggccgccgaatcttcttccgatgacgcctcctccgatgcccctgcagaagagtcttccgatgatggcgccgatgcagaagaataagtgaacataatgactgttgaaatactctaagcggtactatggcaaacgtattttctgaagcaaattttgaggatgaagtcctgaagtccgacattcctgtgcttgtcgacttctgggctacatggtgcggcccctgccgcatgatcgccccgatcattgaccagctttccacggaactggccggcaagatcaaggtgggcaaagtggatgtggacgccaacaacggccttgccgctacctatggcgtgcgtaccattcccaccctcctggtgatcaaggacggggaaatcatggatacgatggtgggagcctcttccaaggacgccatcatgcagcgtttgcgtccgttcatgtaaccggactggtttattcattcaagccggcctgctgcggaatgtaccgcggcaggccggttttttgttcctggggcctgtctgaatgaatccggtgaagggaaggctaataacgggccgtccgccggggtaagattcattttttcttggcaggaccgccatggaagaatacattgtcagcatgggccccgagcagcgggaccgttcctctactcctttgccgttatgcgatttatctcttcattcctctctgtcttttccgcctgctgccttcttcccgccgcatggggcgctggagacatggcgccggatttaaaatccggcgcgttctggaccctcccgcaaccggatttgtttgggaaatatttcaacggggaatccggaggctgggtggacagggacaagacccagctccggattgcgaagcctgcaatcaaaataggggaaatgtccctgggggaaatgctggtgcactggaaggaaggcgttccccagtccatgaccgtcatgatgtacaacaagggggacaacggggccattgacaaggatgagtttgaaaaacgcctggaccgcgtcagggaagggctgaccgctctcaccggagtgcagcccagggagtaccgggccacccggaaggaggcggtggtcaaggtcaatggctggtcctggatttgggacaagggggcgattaccctggaaaccaatacgtcgcgggagggcagggaatttgaagcggaattcatccggttgaaggccggccccacggaggcttccatcgcgaggggcgacgcttcttcccgcgccagaaaggcggacatcaagcagcacgtcaggaaagaaggaaaacgggtggtcatccaggacattcccatggtagaccaggggcagaagggttattgcgtggtggcgaccgccgcccggatttttgcctattacggaatggattacgtggaccagcacgaacttgcttccctggccaattcctccgcggaaggaggaaccagcacggcggcaatggcggagaacctgaaaaagataggggcgcgcttccagatccggatcaaggtgctggattccctgacggacacccgtgatttccggaatctgctgaaagcctacaaccgcgccgcctccaaattaaaaaaggagaaggtggagagtgaatatgactggtccggcttctgggacaatgcggacggggaggtgctgaagctggcgcgcgccgggtctccgtcccagatggacaaatggctcaacgccatcaggccctacatcacggcgggcattcccgtgctgtggtccgttcaactgggcatcgttcctgagccgctgcgcctgtcccagacgcgcggtggccatttgaggctcatcatcggctttgacgaggaaaagaagacgctcatcttctcggattcctggggtgcggcccacacggaaaaggaaatgccgctggcggacgccatcgccattacgacggggcggcaggttatgcagccctccaaatagggccgtgctgcatgccctccttccgctgccgtaagcgcctgaatattctctccggagaaaagtaattctgctggcatgggaaaggcgctgtattatacttgcgccatgatcagcagaacattggtgaaatatgctttgaacagtgaggcggaaatgccggacgtactgattcagggctgggtgcgtacgcgccgtgattccaaggctttttcctttctggaagtaaatgacggctcctccgtggcttccctccaggtggtggcggatgcaggcattcccggttatgaacggattggggaaatggccacgggctccgccgtgagcgttcgcggggctctggttgccggacagggcaggcagcgatgggaactgcgcgctgcctccctggagctggtggggaccgctccggattcctaccctttgcagaaaaaagggcatacgccggaattcctgcgttccatcgcccatctgcgcccccgcaccaacctgttcggcgccgtgttccgcatgcgcagcaggctggcctatgccatccaccggtttttccaggagagggacttttcctgggtcagcacgcccattattaccgccagcgactgcgagggcgccggtgaaatgttccgtgtgacgacgctggacgtgggcgacgccgcctcccgtgacgcagccctggatttcttcggcaaggcggcctacctcaccgtgagcggacaacttgaaggggaggcgttcgcatgcgcactgagcaatatttataccttcggccccactttccgggcggagaactccaataccacgcgccatgcggcggaattctggatggtggagcctgaaatggccttctgcgacctgtacggagacatggacatggcggaagcgttcgtccgcttcctggtcggcgacgccctggagaacagcgcggaagaggtggaattcctgacccgctttgtggacaaggggctgcgggaacgcctggagcatgtgaaggaaacgccgtttgtgcgctgttcctatacggaagccgtggatattctgctcaagagcgggaaaacgtttgattaccccgtttcctggggcatcaacctccagagcgagcacgaacgcttcctgacggaagagcatttcaaatgcccggtcatcgtttacaattatccgaaggagatcaagcctttctacatgcgtctgaacgaagacggcagaaccgttaccgccatggacgtgctggtgcccggcatcggggaaatcgtagggggaagccagcgtgaggaacggctggacattctggaggaaaacatgcgccgcatgggcatgaatgaggaagcctaccgctggtatgcggatctgcgccgctacggcacggttccgcacgccggattcggagccgggtttgaacgcctgctgatgttcgtgaccggagtgaccaacatacgtgacgtactgccctttgcccgcacgccgcgcaactgcgagttctgacctgcgcggggaagcttccgtttttccgttcggggcggcgttgcgcggccccggagcggccgcgttggcgaatggggaaatgcttgtgaaaattgaccccgccggcaaaagaaaaccccggctttccctttggggagcaagccggggtaaaatcggtgctggggcagagactactgtctctttcttcttaacagcagggagcccagtcccagcaggctcagcgtggccgttgcgggttccggaacggtttcatagttgatcagtaccttggtgacgccgttttctgtgacctgcgtcacggtcgcctgtacctgggagttgctggcgatgttcaggccgctcaggtccagattgaggttgcctccctgctgggcggatttgatggaagccagttcaatcgttccgcttccggaaaggctgttcatatccagcgtgccggtgaaggtgacggtttttccgttggtccagaagttggtgaggtccgtagcggtccaggaaccgtgttccgccgccgtaaaggtgccgaaatccagcgtaaagtcacggcccagtccaaaggcgttgctggattcaaataccagatgggaattgccttccagggtaaaggaattgacgttgagatcccctatcgtagtcgtgcagaccagggtgcttccggaccctacctggaccgtattggtagcgccgaagaaagattgcgcggtggaccaggtaacagttccggcgttttccccgatgatggcgttgtcattggtgctgtgctgcgggaagtagccgttcggcgcgccgtccaccgtccagttgttggaatctccatagatcccgtttcctgccgctccgctccagacataggtggcagcctgggaaatcccggcggataggcagcataaaatgcagaatgtagataatctcatgctcaacagatactttaacagagacacggataacggatttccaatccggcgtcaatgcaaatgtttgaaggaggaacacatcaggcaaacatatctttactacaacttaaacggaaaagagggcacgagcatttaattaattcataattcatttattgtaaaatatttattttttaataaaccgggaatcggattggaaatccgtgcagacgtcattcctttatttcgaaatgccgtttttaaaagaaaagatttaatgtgcggcaggagacagtggctgaaacatacggaaaaccctttcccgcacagggcgggaaagggcctaccataaccaagtaaaagcatgcgctgaagcgccgtcctacttagaacgtatagctgatggctccgttgattccatgggaggtcagcttgttgcgggtctcgaactgatagcagacccgtgctccccaattgctggagaaaagcacgtcaatgccggcattcaggcggaatgcggtgcgaccgacgttgacgccgcgcacgttccaggctcccaggggtccgctgacgttggacttgggattcatgcggctcacatcctgcgccgcggccaccgtcaaggccggggtgatggtggtgccgccgtccgtctggtaggcgcgggcaatggtcacgcccaacggaatggtccagttctgggcgcgggcgtggtcaaaggagcggccgtaaggtccgctttccgagaagcccttgagttcggtggtcatgaattcgatacccgtgtaaggcgttacgaaggccttgccgagtgcgaagtgttccgtccaggtggcgtacaggccgccgctgaaggagtccgcattttcattgccgttggcggcggttcccatgatgtaggaattgcccttgaacttggagcgtccgtaggcgccgtagccgtccagcgtgaacttgctttccctgaagggatgcatgcggccgtagatcatggccatgaaggaatccacgtcgtagtcggagccgaatccgctcttgtccttgatgtcgccgaagctctggcccactgcaatgccgatcagggaaccctgggcagccttgtagtcaatacccacggcatagccgcctgcattgtacttgtagccggagatgcctccgcgggcgtcctggtcatcccagttgcccatgccgcctacccagatgttgccgttgcccttggcgatcgtcttgcgggcgatcggggagcccttggcgtccaccacttcaatggtgtcttccgtctggcgggccatggaggcggcggactggatgcgtcccaggtcggcaaagctcctcagcgtccggctggcggcccacgcgaagttcatcacgttttcaccactgacggactgaatcatgttggcagcttcgttcgggtccgtcacgcgcagcagggtttcatagaactgggcggcgggagaaccggcggccacgttcaggcggttgctttccagagcggccgctacggtgtaaacgttgccgttgtagccggacatgggaccgtcaatgcccctcatgttctgggtgatggtggtggtgccttccgtcgttcccggagccatggtggtggtcaggaacaggttgttcagcagacgtccggaaatgtccgtgccgttcagcgtgacgttcacgctttccgtgcccttcttcagctgggcgatcgggacgggattgccggtggcgtcggatacctggatgcccacgcgggaattatccgtgaaggtggccggggtgccgaagtcaagcacggagccgtcgctcaggagcagggtggaatcgccgccgaaggtggcggaagcccccttcatggtggaattctgcgccagggtcacctggcccgtccggatgtcgtaaaccgtatcgtccgtgcccattacggcggcgccgatggactggaggggaccgacttttccggtagcggcgtccacggttccaaaggtggcgtggccgatgatcaggttgccttcaagctgccggtaggtgcctccgaacgtgtcggtggctccgccgccgccgtagacgagggtgcccgtgccggtcttcgtcatgacggtctggtcagcggccagaggggcggcgtcagccgtgggggccgcgggagccgcggtgtcaatgccgtcattgatgaaggtgtaggcggtgccgtccgtataaacgttgatctgggtgttctggcccgcatgcacggaaccgaggacgccgttggacgtgttgtcggaaagaactgcgccggaaccgatgtacagggtctggccgtcggccaggttgatggcggccttgccggcgttggtggcggtgttgcccacgacctgggtgccgtctccgatggagatctggcctcccgcagtgatgatgccgtcagcggcggtattgccggtgatcacgctgttggtgccgatggcaatattgtcatccgccgtcagggtggaattccccttgacggtggtgttgttgcccagggtgacgctgccttcgatggtgtccagcttttccgtgcccacaaccgtattccagttgccgtcgtcattgctgtaaaccgtcttgttcaggtcgacggattccgcggaaacggtggtgccgttcagaacggtgttgtctcccagggaaacattgccgcctacagtcttgatggtgatggatccggccgtggtttcaccaaggacgatgccgccggaaatgctgtcatccatggaatcgatgacggttttgctgttctggttgttggccgcgtcaaactgttccgtggtcacggtaccgatcccggccgtggaggtcacgtctccgttcagcgtaactttggccgccggatcactgacgatctggccggtagccgtcacggtgtcctgcatggtgacgttgttgcccaggaccacggcctgctcgttggaattgctgtaggtgtcgtaggtcgtcctggtataggcctgacctgccgggggcgtggaggggtccaccgtgtgggccgcctggccggtaacggtgacggctttttccatggaaacgttgtcgccgatgcctacctgtccgttcgtggaagtgacggtggcgcctaccgtcttgggattggcggcgtcattcgttccttcgatggcaatgttcctgccgtcaatggtggtggtgtccgtggcgttcgtgactacgatgtcattgtcgcttcccaggggttcgctcagcgtgatgtcgttgaagctgacctgtccattaaccagatcataattgaaattaaccagtttgccgctggggtccgccatttggacggtaacgttgcccgttccggagatggcgttcaactgggcccgttgttcctgggtcagtgtgatgttatcggagcctgccggcacggtgatagtgatggttgacgcttcattcgaggcggcagcctggttccaggccgtcacgaatgaatcggcgctgttggccgcatagttagctgccgtagcaacggagaaactgccaaggcaagcgataactgctgccagcagcatatgtgggagtcttaatttcatgcttttttatttgtttaatgattaggtggttatgcgttcgtgacaatcacggcgcccgaggttttagatgattctcgttccgggctgttcagtgggatgacatgggaaggtttgatggagatgggaatgaaaatgattcaggataagatggttgcggctattgtctggcggtctttgtcatgacagggtttttaaacctggagccggaaaggaatcccagaaagcttccagtaaattcattttcctgagaagaaaaaatatctcattgatggtgagggatgtatgatgttttctgggtcctcttttattttgctgtttccttcccggaataatggccgtgaaaatggttcaaatataaataagaaaatttgtttccggctgtggtggcagtttggatgctccgttccgcctctgcaagaatggaactttccgaacagggatgtgtccaaagctgtgcaatcaggcgaattttattgactgccaacggtcggcagcctattaccggggaatgactacccgattgtttacggtcctcgcggccgtgttgctgccgcttgccccggcgcaggaggccgatgtgccgcaccagccgcgcgtgtggaccaataccgccggcaaaaccatcacggcggcttttgtccgcttcaacgccgccggcaggaaagtttcccttaaattggagaaaggccgacaggtggaactgcctctggcaagcttgtccgggaacgacgtggactggatcaaggagcatgttccggaagccatgagcaaccaggagcgcatgcagcggcatacggaaggaaggctggggaagatcactaaaatccccgctacggattcctatccggaagcctttgtctattatccatccacgctgaaggcggaaactccgcctcccgtcatcattctgtttaattccgtaggcaatggacagcacatggtccagaaattccggaaggcctgcgaggccaacggatgggtggccctgggattgacgacgtttaaaaattcggagtccaaggaacatgaagccggactgggcaagctgtggacttccacgaacgggagtttggagagaatggccttttttgatgcggaccgcatgtacatgggcggcatttcaggcggagcgtcccgtgcctttacatatagtgagcgcaggattccgcccgtccgcccgtggaaggggattgtatccatgggcggctggctgggagggaaggaccgcctcacgtgccccacgcgcatggcggtggctattatcaatggagacaaggacggaggagccaacagtgccgtcagccatgacgtcaaggttctcaaaagaaggcagtgcgccatcaaggaatttccctttccaggaaagcatgaaatgccgccggacgagaatttggtggaagtcctcaaatggatggaggaggtgtcaccccagacctccgcgcagcgtcttccctccccggcggaaaaggattaaagacccggtgcgccccgcatttaccgcaggaagggggacaggcttcttattctaccgcccactcctccaccaggctggccgggaattcatccagaaagcgggagggcatctgcatgaaggttcctccctgcgcgcggcagttccagcgggggtaggtcaggtaaagctggtctttggcgcgggtgatgcccacgtagaagaggcggcgttcctcctcaagacccgccaggtctccgtcgtcaatcacccgctggtgcgggaacatgccgtcgcacaggccgatcaggaagacgacggaccattccagccccttggcctggtggatggtggacagggtgacggcacctccggagaggtccgccgccgcgctttcatcatccgtattgcccagcagggaaagctgggagaggaaatcctccgtggattcaaagcgttcggagaatccggccaggtgcaggagatcctgcctgcgctggtcgtaattctcaaaggcggcctgcatgtactcgtcatacacggcttcattgatggaaatgagcatggaggccggcccggcgatttttccggctggggccagttcatccagcgtgtagcagagctgcgtccaggccgttttggacttggccgggaccggaaaatccagcatcagggcggagaaggattccggcggcgtttccagccggctttccgggcaggcggcccagcgtatccagagcttctgggccatgccgggaccgatgccgggcagcagcatcaccatgcggcggaaggagagttcatccctgggattgaccacaaagcgcatgaacgccaccacgtccttgatatgggcctgttcaaaaaacctgatgccgctggtgatgcggaaggggatttccccgcgggtcagttccatctgcaattccatgctgtggaagtgtgcgcggtagagcacggctatttcattggggtccgtgccttcttcaatgaggtcccggatgcgctgggcgacaaatttggcctgcatcctgtcgtcgttgagcggaacgagggccgggggcatttccccggtaggccgcacggagcggagccttttttcaatctgcacctcgttggcggcgatggccgcgttggagagctccagaatttccggcacgctgcggtagttggtctctatcttgaaggtctttgccgccgggtagcgggtagtgaagctgaggatgttctccatgtccgccccccgccaggaataaatgctctgggcgtcgtcccctactaccatgagctggccgtgttcccgggacagcaggtcgataaagcggctctggaggtagttggtgtcctggtattcgtccaccaggatgtgctggaagcgggagccgtacagggcgcgcagatgctcctgttcctggaaaagcctcacgacgttgagcagcaggtcgtcaaagtccatgctattggtttcctgcttgcgggccacgtactgttcatgcacgtccaggatggcgtccaggtggttggagaggtacggataggcgttttccagcgtttcctggatattggcgccctcattgtccgccaggctgaacagggaggaaaggacttccggtttggggaagcgggtggatttctcatccagtttgagggacttgaccacgcttttaatcatggatttgcggtcgtcggaatccatgatcgtgaaagccggagtatagcccaggtattccgcgtgctggcgcaggatgcggttggcaatggaatggaacgtgccgctccacaggcgggacaggtccaggggaatcagagagcgaacccgttccgtcatttcccgcgccgccttgttggtgaaggtcagcagcaggatgttccacgggtccgtgccgtggtccaggagccacgccacgcggtaggtcagcgtgcgcgtttttcccgaaccggcccctgcaatgacgagcgccggccccggttccgaagaaacggctgcatactgttcttcattaagggccgtgcggtagtcgatcccggagatgggagcggctggtgcggcatcctgcttgatgacgtagcggcgggccatgcgtttcagttaatagttaatagagaatagttaatgggattggttgaaaaacttttctctccactctccactctaatcactctttaaaagtccaggtacatttccgcgcggcggttttccttgcgggcttcatcccgcgttccttcgtccgccgtgggggagtaggtgcggcgcggttgtgatttgccgaatcccttcgtgatgattctttccgcaggaacgccgaactggacgagctgggccttcacggccgccgcccggcgttcggagaggccctggttgtagcgttcactccccacatcgtccgtgtggccgctgatttccagcttcttgccgctatccgtcttgatggcctccgccacaatctggagctggcgttcggaacgcttggacagagaatcttcattgaaaccgaagaacagggccagggaatcgcccccctgcggattcttcacgatggggatgaaaatgtcgtctccggccccctgccgtttcgtgtaggcttccagcatgttgtccagggaggcttccgcaatcagccattgttcatccttcttggctacggtcaggcccacgttgccggctttcctgccctgggcgtcctgcaggtggacgaaaaagcccgcattggtgggcgcttcataggcggttttgatgggagcgtcctcccggaggcggaaggcgccttcttcaaacaggatgcacagcccggccacggtggcgtcctgcaccttggttccgtccacgaatttccgtgccgtgcggaagtccgccttggcaacggcgtccatgaaggagctgacgatgcccatgggatcgttcatggccatgggggcggccttgtccttggccaggtcctgcttgctgggcagcgtaagggtgtccagcgtccactgctgcttgtcattgcgcttcatgtccaggtagccgcgcgcgccgctgctgaagttgagcgtgtatctggccgtggggttggccccctggttatttgcgccgatgctggtgatgccgggggtggaaaggcgcacatggcgcgcttccatgagttcccggatgatgcggccctgggcctccgtgacggcctgctggatttccagggatttcagggtgtccgcgtcccggtcctgaataaccttggcaatcgcctgcgccagcgtctggggggagctgaggttgaccagggaggacggcgtggccgtctgccggctgatgtcttccttggtgagcgggtccacggtgggctggggcgtcaccgtctggcgcggaggaacttccgtttgcgccgcgggttcagcgggggcgggctcctcctcccggtttcccaggaacaggaagaccagggccaggctgcccacgaccaggaagctgatgatgaaggcggtgatggtggatgcgtttttcattggaggtgaatgtatgaaaaagggtcaggcgttcaaggcttccagcaatttggcgtgaatgccgtcaaaaccgccgttgctcattaccagaataacgtctcccggctgggctttcttgcagacggcggagacgatttcctgcgcctgtccgccgatcagggcgtccttgcccagcgcggagaggtcattggagagtttggtgaggtccaggcgttcctccagggccaccttgtccggatggtccacggcggccaccacggggaaatccgccgtagcgagggataacgccagttcattctggaagatgtttctgcgcgtggtgttggagcgcggctcaaaaatggcccagatgcgtgatcccgggtagcgctggcgcaggcccaggatggcctgcttgatggccgtggggtggtgggcgaagtcgtccaccacggaaatgccgttgaccacgcccttgacttcctggcggcgggccacgccttcaaagcggcccatggagtccgccagctgcttgacgttcagccccgcaaattgtgcggcggcaatcgccatggcggcgttccggatgttgaattccccgatcatcggcacgtagtagcgggttccttccagcgtgaaatggctgccgtccgtggaggtttccacgtccaggatgcgaatgttggaagagtcggaaaagcccagcgtcttgacggggcagggggcccccttcaccacgtccaggcagttgggatcgtccgcattgaccagcgccaggccgttgcggggaatgatctgggtcaggcggcggaagctcagcttgatttcctccagggaattgtaaatgtccgcgtggtcgaactcaatgttgttgatgaccaccagttccggcaggtaatgcagaaatttggagcgtttgtcgaaaaacgccgtgtcgtattcgtccccctccagcacggagaaatcggaatccgtaaaacggccgccgcggcccagattacgggcgatgccgccgatcatgaagctggggttcagcccggagtcctccatcagccacgccagcatggacgtggtggtggttttgccgtgggtgccggtcaccacgtagttgcgcttgccgcgcaggaagtattccttcatcgtctccggcagggagaggtagcgcaggcgccgctggagcacggcttccacctcctcattgccgcggctcatggcgttgccgatgacgatgacgtccgcgtccgcggggatgttggaggccttgtagccttcaaacagggtgatgccctcctcctccaggaaggtggacatgggggggtaaacgttggcgtctgagccggtgacggtaaagccgcggcgggccatggcggcggctaccgcacccatggcggttccgcagatgccgaggaaatgaaaatggctgttcatgacggggggagaggaatggagcaggtttttatttggaaaaggtgggggccgcaatgcaggaatccgccagggcgcggtcacggcggcgcacgatgccgttggcgatgtccgtcaccatgccggacagcaggcgggtaaggtggctgccgggcgtgtaatccgccggggcgatgaagttcacgcggtcggaattggaggccaggttatagcacttgcggaagctgcggcccgtttcgtcctccggattgtacacggccacggcgtggccgccgttcctgcgcatgacggtgaagcagggcacgtccgtggggccgtcgccgatgtagatcatgttggcgaagggaatcgggcgcatgtcctccggcatgtggtcgttcacgtcctggtcgtaatccagcatgcccttgttgatgcggaagaggtactgggtcttcgtggtgtgggaaatgaccctcttgggaaagttgatgtagccgttctcctcgctgaactcgcacccgaacacggccttgaaataggggcgcagggcagagccgtcaatcagggctttcaggccggaggaaatgatgtagtattcaatgttgatgcccaggtccgtatgaagggaggacagggtcatggacgggaaggcgtcaaagaaatccggcaggccggggtaaaaggtgaggcgttccccaagctgggtgagccgggtattgctgacgcggtccagggagagggcgtccagcaagcttttcatgtaaatcagttccccgtcccagccttcccgttccccggtggcgttgcacttggtccagaactcctgcggggagatgccgaattccggaaaaatggcctgatcctgcatgtagaaggggctcagggtctggtcatagtcgaacaccagggcgatcgtattctgcggagaggacatgggaggggcggaaagtggcgttacatgcggaactggtcgcccaggtactgcttgcgggcgatggggtcgttggcgatttcctcggaagtgccgtgcttgatgaccttcccttcaaacaggatgtaggcgcggtccacgatgtgcagggtttcccgcacgttgtggtccgtaatcaggatggaaaggccgtccgtatcgcgcagctccatgacgatcttctggatgtctgaaacggcgatggggtccacgccgctgaacggttcgtccagcatcagcagtttggggctggtggcgagggcgcgggcgatggtcagccgcctcttttccccgccggaaagctggatggccatggagcggcgcagcttggtgatgccgaagcggtccatcagctccacggcgcggtccttctgctggcgggaggtcatgtccttgcgggtctggagaatggccaggaggttgtcctccacggaaagcttgcggaagatggactcctcctgcggcaggtagcccatgccgcgcttggcgcgcaggttcatcggcagttccgtgatattctcgcccgcaaaaatcacgcggccttcgtccgggcgcacgagccccgccaccatgtagaaggaggtggtttttcccgcgccgttcggccccagcaggcctacgatctcgccatggcccaccgtcaggctgacctggtccacgacggtccgcgttttataggttttgcagatgccttcggctctcagcagatggggggataggggggagctcacggcttgcggttggttttctgtttgtcccggtcggaaagcttcttgtctacgtggcggaacgtggtcttggtgccgcggctgctgtacatattcccgttcgagtacacgcggatgaaggcgtccttgttcggattcttgatgatggcgtccggcgtaataatcaccggggagcctgtcaggatgatttccccggttttggcgttgtaggtgatcttgtccgcctgggcgttgctggtttccccctccttgttggtatagctggctttcacgttgccggaggctgcgaccgttttaatggagttatagtcaaaattgccgccgttggggagggccacctggggcttctccccttctttttccttttccttctctttttcctgcttgcgttcggagggcttcttgtcgcccggcttcttcggcacgaactccgcataaattttcaggtggtccgcacagtccatggaaagattggggttgcgcacccggacgtttttcatgaacaccagcacgccttcttccatgtcgaagtacaggtccccgtcacaatctacggagtacaggttgtttgaggaattggcgcgcatgaagttctcttccggattgggcgcagcgggagcggtgtccgcagccggggcggcggcattgccggtgacctggtgctgctggcggaattcctgaatctgcccgtcaacggtcttttccttcacgttgtacgcttcaatcgccttctctccatcttccttcaggcccgcggtcggaacgggggccagttcccgttccctccgggcggtttcctccgccgtcaggggacgcacgatgccggaggggggagccaggggcggctccaggcgtggatccagttccttgggcaaaggctgtacgatatgggcgggaacgccgtcagtggcgccgcaggcaagacccccggtcagggcgagcagcagcagggaggaaagttttttcataaaaggaatggttacttgttgcgttgatccatgcggatggtggtttgaacggggccgaggatgatgcccctcttgatattggtatccatgtaaaggccggtgcccctggcggaaaagttctcttccttgagggtggtctccgtatgggagacgaccagttttttgtccagaaagtaggaggcagccttcgtgaaaagatgggaggtctggttgttcttcccgtacaggtacacgttcaggatgctggcggcaatttcctgcggggcggctacggtcacgcttgaagcggtcagcagcatggaaaggcgcggcccttcataccgtgacaggctgactttggggagcacctggcctacgggcagaagctccagcatgggcaatttcttgtctacgccggcgaagggcgtggctgcggggagggtggtatccgcctgcgccgccatgccatgcatggcaattaccagaaagcatgtgaacggtaacttcatcatgactgaaccgcctgatggatggactgaaggcgtttcagcacgccttcaagcaggtggagggggatttggttgggcccgtcggaaagagccttggacggatccttgtgcacctccatgaacacgccgtcaatgctgccggtcgccatggcggcggacgccagcacgggagccagttcgctgtctccgcccgtggttccgcccaggcctccgggcctctggaccgcgtgggtggcgtcaaacacgacggggaagccttcctgtttcatccagtacagggagcgcatgtccaccaccaggttattgtagccgaaggaggtgccgcgctcgcacatcatgaactcgtcacagccgaaggcgcgcatcttttccccgatgttcacagtatcccacggagccaggaactggcccttcttgatgttcacgggacggccgctcttggcgcaggcttccagaagatctgtctggcggcacaggaaggcgggaatctggagcaggtccacgtattcagcggcaatctccgcttcccgggccgtatgcacgtccgtaacgacgggcagttccagctctttgccgatttccgataggatgcggcagccttcccgtacgccgggtccgcggaaggacgtgatggaagttctgttcgccttgtcgtaggaggccttgaaaatcagcgggatgtccaggttttccgcaatggacttgatggagcgggccatctcccagacgaaggattcgcattccagagagcaggggcccaggaggtagaacggccgcgggccgccgatttcaacggattgaatgtaaaacgacataaaacaaaacctgtatgtccttatatcatgacggtttcaagccctccggtcaagccgctatcctgcctccgccgggagattcggcaagagggggtcattttctccggaccctttctttagaaggttcataagaaaatgaaaatcagcggaataaaagaatttttcctgccgtattgcggagaatgggcggccatggagggaaaaggcggttatggtattgccggaatccggcgtttctgttacaaacggcaggcatgcaccgtccctgcgtctgcaagtggggaagatgctgaacgccgccttccctccggggtctcacttcacatgcccaaaaaaatttacaagctatgcgtctcctatgatgaggcgggggccgaactccggcagcatctggcggatcgcatcaagctgctgggcatggacggcgctcccgtctggcaggcttccttccgggacatgcaggcggacgacctgcctccgggcgacggggtggttcagatttatccagtcttcatgcagagcggctggacggtgacggaagcgctgccggaacaattgagcgccatgtatgcggaacgcggcgtgtctccggaatctgaattcaagccggtgtggggagccggggaagacgtgatgcccctcctgaccgttcgcgacgccctcgggaaagagctggggccgggaacgtccctgctggtggtggcccatggagtggtgggaaaggaccttcctccggagccgttcgcctttttacagaaactgcgggcctttttatggccgcaggaaacggatatggccctggcctatttcggagcttccccctccgtggaggaagtatttccacgtttgaagggaaacagggtggtggtgcttccgttcctgatcggggagggaaagcacatgagggaggacatgccttctccggaattggcggagaagtggggcaaggaactggaaatattgcctcccctgggcgcgttttatttgcagaaggcgcgggaatactggggaagggaacgctccggggtttccgcgaagacctgtgattgacccctgcggcgttccatgacggtttctctttcctccgggtgagataccggttccggtgcggggcgaatgccagccgcaatcacgcggcctgccggacggctcccggctcttcctcacggcagggaggaaagccctgcttcatggactgcgccagctttctgctggtgaagtaataggcgatggcgagaggcacgcaggagccgatccaggcggcggggctcgccatgctggctccggtgaagcccaggcagcgggccagcacgatggcggccagggcgcgcatgcacagctccatgacgcccgcgaaggtgggcacgatgctctggcccagcccttgcagcgtgtagcggaagacgaagaggagcgccagtacccagtacatggaggcattgatgttcaggtaggtctgggccaggctgacgacttccttctccccgtctcccacgaacagccggatcagttccggcccccaggcaatattggcggcggctacggcgatgctgaaccccacggacatcaggttgcactggagaacgccccggcggatgcgctccagattcctggctccgtaattctgggccacgtacgtagccatcgtgatgccgaaggacatcatgggcagcgtcgccaccatgtcgattttctgggccgcgctgaaagccgctactgactgcgctcccagccggttgagggcaaactgcaccagaatggctccaatggcgatgatggatgcctggaaccccatgggaagggccacgcggatatgcgcccagaggtagcggcggctcatgttccagtccgccctggtcagccggagaatgggaaaccttttaaaaacgtaggcggtgcagcagaggcccgcaaccagttgggaggctacggtggcgacggcagcccccgcaggtcccatgccgaaccgcaggatcagcgccaggtccagcgcaatgttcagtacgcaggccagaaccaggaaatagaggggcgtccggctgtccccgagggcgcggagaacgttggagaggaggttgaacagcatggctgcgccgatgccccaggaaatgacgatgatgtaggcgtgggccgcctccaggatttccggaggagtttgcagcagttccagaacgggacgagcgaaggcgacgctgacggcggtcagcaggacggtcatgacggaactcaggacgatgcagacggcaaagctgcgccgcaccgcccgcctgcggcccgctccaaagcgctgggccgtgatgatagccagccccgccgtgaatccgatgacgaagccgaggatgaaaaacatcaggccgcccgtgcagcccacggcggccagggcttccacgcccagcgtgcggcccacaatcagggtgtccgccatgttgtaaaactgctggaacaggttgccgatcagcaggggaatggtaaacaggaaaatcaatttggcgggattgccgcttgtcagggtcttggtcatccggaacgcccgcatggaacgcctcttccatgttttttccaagactgttttgcggcatgttcctgttttttgtacgataagtatcaggcagggggtgaaagccgctgcggaggcgttcctccggcgggatgccgcggatggcggaatggttgcgtaaatcaatgatttatgctttgacaagaagggcatcgtgaagtatattatttgtccctcgcgtgattcggcgcaacctgaacaatggggatcggaggggtagaaagcgtcgaagtccccaaaaaccgcttttcctgccgcaaggaaagccacctacatacatatatgattaatgatctgattaaccagatggttgaagccggtgttcatttgggccaccagacccgcaaatggcaccccagcatgaagaaataccttcttaaggacaaggccggtatccatatcatcaaccttgaagaaacggaaaaatgcctggacaaggcttgctccttcctggccgatctggcacgccgcaacaagaagatcctcttcgtcggctgcaagcgccaggcccaggaagccgtccgcgaagccgcggaagccactggtcagtactacgtcaaccatcgctggctgggcggcatgctcaccaacatgagcaccatccgcaagagcatcgaacgcctttcctaccttgaagggattgaaaagaccccggaattcaagagcatgtccaagaaggaactggccgctctggaccgcgaacgccagaagctggaacgcaaccttcagggcatccgcaacatgggcggcgctccggacgccatggtagccatcggcgccgatcatgaagacatcgccatccgcgaagcccaccgtctgaacattcccgtctgcgttctggttgacaccaacgccgacccgaaggaaatcgatttcccgattcccggcaacgacgacgccgtccgttccatccgtctggtccttgactgcattgtcaaggccatcaacgaaggcaagggcgctcccgccgaagcctaaaccaacccatttagaaagaacagaaacactatggcagaaattactgcagctctcgtcaaggccctccgtgacaaaacggacgccggcatgatggattgcaagaaggccctcaacgaatgcaacggcgacatggaagccgctgtgaagtatcttcgcgaaaagggcattgccaaggctgccgccaaggctgaccgtgacgccaaggaaggcgtgatccgcgccgccgtggctccctgcggctgttccggcatcatccttgaactcaactgtgaaacggacttctgcgccaagggcgacaagttccagggcctggtgaacgacgttgccaaggctctcatggattccaaggccgccacgctggaggaagccctccaggttgccatgcccgaaggcactacggaagaatacatcaaggccatgtgcagctccatcggtgaaaacatggctctgcgcaagttcgcccgcctcacggtggacggctccggcgctgtggtctcctacatccacatgggcggcaaggttggcgttctgctgtctatcaaggccggcaaggaagaaaccgtcaagtctgacgcgttcaaggctcttgccaaggacctgaccctgcacattgccgccgccgctcccaagagcgtcagctccgacagcctggaccccgccttcgtggctgaggaacaggaaatcgccaagcagcagctcatccaggaaggcaagcccgaacacctgctggaaaagattcttcccggcaagctgaaggccctgtacgcccagtcctgcctgctgaaccagggatttgttaaggattccaacgtcacggtggacgccctgctcaagcaggtcggcaaggaactcggcgatgacgtctccgtcgtctccttcgtccgctaccagctcggcgcgtaagctccgcggcagcatcaatctcaggagccgttcccttcgcggggaacggctcttttttgcttgagatggatccattaaagatttattcataaaccatatgcatggagaaaccgggagtccggatatgggtcatcaaaatgtgcggggaagaaaagatccggtcctgctgctgattattgcctccaccgtggtagctggtttctggagcgctcttgtgttgaggaatgtctttggccttgtgtgggggccttggtatttccttgcggtgttgtggttcttcaaaaagaccaatagacggtggaaatgggaaacaacttcttttgttgttatcggcctcgtgtgttactatgaactcttttggtcccgggtgactccggaagatatgcgcgatgcccagtcggggctgattatcatttttggtccggttttttccggaatagcggctttccttggagatgccggggcagctcttctttccttccttgtccgttcatcctgcggcaaagatgagaaggagaagtaaagttgttttcggtagaagggcatctattggtacaggacgcggcggtagtaaaaacaggctagatttttcctgcgtattcttcatgcctgccccagtgttttttggggcaggcatgaatgggagatgcgcatggatgtcttgatattggcggagctggcacggttggggtcttgttttgcctcaggcggcttgttagagtgatggtatggcttttctggaactggatcatgtgagcgttgtctttcctgcggtgcagggactgctctcctcccgcaaaccggcgtctgtggtggcggtggacggggtgtccctgtccgtggagaaaggagaaatccttgggttggtaggggagtccggctgtggcaagtccactctgtcccgcacggtgatgctgctccagaagcctacggagggacgcatttttctggaaggagaggaactgacggctctttccgcctccgaggtcaggaagcgccgtccggattttcaaatgattttccaggacccctacgcttccctgaatccccgtttcacggtgtatgcgacgttgaaggaggcgttggaatgccgcagccgcaaaagatctttctcacagatgagggacgaggtggcggaactgatggaaagggtgggcctgaatccctccctgatgcgcaagtatccccatgaattttccggaggccagcgccagcgcgtagccatcgcgcgtgccttggctccggaaccccggctggtcattgcggatgaacccgtttctgcgctggacgtctccatccagtcccagattttgaaccttctcatcgctctggcccgcgacttgaacctgaccatgatcttcatttcccatgatttgtccgtggttcattacattgcggaccgtattgccgtgatgcgcaagggccgcatcgtggaatacggggaggcggacgaagttttttcctccccctcccacgagtacacccaggcgttgcttgccgcagtgccgcggctgtaggtgaatggaagaaaaaagaaggggggggagggattcctgtcaatgaatatgctcgttccatctatctcctttccaacgatcagcaaaagggaagtgctcagactgtcctgcatcaccaaatggcagataaagaaagttcggtgtagtcataaaatcctggtcagtaatttgagaattttacattactctcatttttattcgtcattaggtaataaggcatattcttttttaactagaatatcatgacaattaaaggttaaaatggttaagtggggattgggtcatatttccactactataatgatatgtccggtccagcgttattgttttggaaaaaacgggaatgttgcatgggttccaaaggtatgctgatgccaattatttttagaatggaatggaggattttattgtatttaggcctgtaataatggtcgccgtaaaattgttcaggatagatgatgcggtccgtaaattcgacatggaattctaaagttattttaatttcatatccgcatatttgactcatgtctgaaagtcgtttgttgatttcgttgatatttttgtctgtaaccagtatgtctgaccagtattctttaaatacaaataatacatgctggttgctgtttatatcaagagaatcattttcccaccattcaacgatacttatcagctgatgtagatcaagatctgaaatgccgtttcttttcatcagcctttttccatattttcgtgaataccattaaattctgaaaaatcacgtgatatttattgaaaatattctgaaaagaatcaatctgattttcataagaaatttttctattttaaaattaatcccataatgattggagatctataattccgaaaaatgattatttttagtgaaaatatctaaagaaacttccatggcgttttcaaaatttaatattttcttttgttcaattatatattccggatcttcttcaattattatttttgcgtactgtgctaagctatgtagaaaacaatgttgaaaataataacctccgtaaaatactctcgttttccccgaaggcattttaataaggataataccatttggtaatactttttgggtacttggtatacaaatactcgtataagaagatccatctaccgcgagagtttcaacttgtgtatatttgctctttattttttctaaagaagaaacatcgaaaaatcttttaagactctttgcactttctctattgtttaaaacatcaatataataatataataaaataaaagaaattaaaacaaatagaaggaatatgattttttttgcattcatttataaaagaaaataattctaattgaatagtttttgatatagatactgaaatccataaatagctccatatccaaatacaggcgtgccatataatacaatttcacaaggaaacatactctgtaatgatgtccgtagcgcgtcattttgtcccaaataacatgagcgtaactctacttcacatttttcacaaaagggaatttttacatttttgaatacatctgatatttgctgcctcgttcgagtttccatcagtccagcttctccccactcagcgcgtacattctgattagttccataggacatatctgtcccgtgcatcacaataagcaatttttttacacattttccacaacaacagtgttcactgggattaaaatcatctggagaaaatgtctcataaaccgggccttttctttctaatcgctttttgacttcttcaagtcctttatctttttctttttgctttccaggataagcaatataatttaatgttatttcgttgctctctattatagaaggttgtggaataggaacttcaacgattccagaggcacctccattgtaggggggtattgtacctaataaatccacttctatgttaattctattcctaataaatgcatacaaattccaccctccctgttcctggatgggatcgcggttgatccacctgccgtctgcgggattgaggtggcggtaattgtagtagacaagccccaattcgtcatctgcatactcgcaggaaaacctgaacttgttctcttgagccatgtcttccttagcggtgagaaggctaccaaaaggagcatactcgtaacgagctcttctcgtctgttgtccgtcaaaaatggaagtaacgttcttcaaggcatcgtgcatgaagtagagatgctcttcctgctgtgaaatgttgtctttccagcatgtcatcatcaggacgcgcgtggctgtaggctccgtcggatcccacaaatagctcttcaccagcaagggttcgggatgcgtcaaatccagttgggctacctgcagataatcccggtacaggaaccgggagtggctggatactgccccattgatgaccactttcttctcaaagcgccgtccccggtagtcgtagccgcaggtgatagttgttctgccatcctggctggcgaagacgacggggcggtcgttggcgtcgtaggagacttcccagatgcccgttgaggtcctgatgcgggtctggttgccgtcggcgtcgtaaacggggttaaaatcttctttccccccggcaatatccgtgtactggttgagccggttggattcgtaggagagggcttcctccagttcccgggctattttgcggttgccgatgttgtcatagcagtacgcaaagcttcctccccggctgatgcggtcttccagcagttcactgcggctgttataggtaaaatctcttactacttcagcagtagtgctgtcccagcaatcccgccgctggacgggccgcatcagcgcgtcatagtcgtattcgtggccggccgccaattcgccgtccgctcccttcctgtaaccgatagcggttacgaggttgagcttgggatggtaagtattgctgcggaccatgccgttgggataggtgagctggttgaggaagccgctggttggatcgtactgccaggtaaagggagaagcgatgccttccagattcatcccaatcatgccgcctttggaatcgtagtcaagatgggagtgctgcacggtgtgtgtgccgagcatcaggcggtatccgttggaacgcccctgggcatcgtattcttcttgaagagaactttccacctgtccaaaggaagtgtcctgaatcatcctgccgtagctatcataggagagttcccttaatccggaggcgtcccggatggaggtcatttgtccgaggtggttgtaggtgaacttccatccgggagtagcgtcattgtgggaggcggagacgagttctcctgtaaagggagcatacttatacgttgtgacaagccccctggctttgacaagtgtctcctgacggttgagctcgtcataggttttggaaacacaggaaccgtcggcataagtctttttcaattccagccccgtggcctcgtcatagagccagatggtggtgtctccgtcggttcggccggaaggatcggaagtgatgtcgccttcgtttgcacggaaggtagtcagggccaccatgcggtcggcttcgtcgtaggcgaagcaggccggctgaatggcggtgccatattcggccgtctttctgccgcggatgtcataggaataacaggttgttcctcccaaagcgtcggtgatgcaggcaggatggtcacagcaggacaggtaactggtgatggtgacgttgccggctgcatccgtggttttgactggtcgtccgtctaagtcagtttcaatcgtcgcgacattgtctctggcatcggtttgttttagaaccattcctgtggaggtataagaacgttcttgcgaggaatggaccccggcatgattcgtttggcttaccataaacccgtcgacgacaaggatctcggctgtgatatcggaagtgggaatgcgactgaaccgggtgcgtttggtaggagcggtatactccgtccactggatgctctgctgtccgtagacgtccgtggtgatggatttgttttccagtacagcgctgagtctggaaaccatattctccgtggtttgaatgagggggagaccgtcggcattataggtcgtggaggtctgtacctggtaaatgccgtcttcccggatccggtaacaggatgagatttccgatatcctgtttctggtagtatcttcgggatagagggtgtctaagagaacagttcgtctgacggcttgtcccagctcattgtagactgtgaccatgggagccatatcttccttttgggtactaataagttgtcccttgtcattgtaaacgcttctaatgacgatgaaccctcccttcgtattgggttgttcctgccggacgatttgaccaaagccatttttcagaatccgcgacagcacaactcccttggacaaggtcgtggtcaggatgccttcttctgtcagctccagccgggtctccatctctcgctggccggttcctccctccagaatgacagtgccgtcataataggttttggtaaccagagtggcccctgcaggagtggtaaccgtggtggtaaggccgtcttcgctgtattcagtccgagtcacgcgaccaagaacatccgtcgtggcaatcgttcttcccaaattgtcatactccgtgctttccatcgtcgtcatagctcccacatcccgtcgtgtggctatggttcttcccgccgcatcatagctgtaggaggtaatcatttcaggggtggtttctgtcgccgagcggatggtttccaccagctgcttggccgagttgtagccgtagccggtcacaataccgtcttcgtcggtttccctcaacggcccacagcacatccactcagtcgtactgactctgccgttgcccttcgtcgtcttgacgagcctctgttcgtcatcatattcatagtcctccgaggcaatcagcgaccagccttctccggtgtgaacgtattgttctttcctggtagtggtgccgttttcagcgatgtattgcacgtttcgtgtactttgtcccggaacgatgcttccgttggactgcacggtctccgtcaccttgtggagggctccgtattccgcggtggcttcgtaagtataaacggtttgcaccccgtcaatactctggctcatcttccgcctgccccgggcgtagggatactccgctgcctccccataagtctcttccacgcgggtatgaacctggtcgcttcccagcgcggtttccgtcacggtcgtgcggctggcctgcggactgtcttcatacgtgtaggtgcgcttgagaagcgccgtttcttctccattctcggcaataattacttcggtttccgtagcgggcctgaagtcgttaaagcgcaagtcggcgtaagtcgtgcgtgtccccttttcaccgccaccggcccagggagcagcggaaagcacggttctgccctggtcatcgtactcgtagcgcgtgtaccctccatcgggcttgatctccagggacacccggaactggtcgttgtaggtgtaaagcgtagtctgagccaaaggtgtgttgtagccctgggtgctgctgatggtcaaccagcctccctcggtgtacttcttgactgtacgcgtgcaggaagaaggcgtttcatcgtcgatgccgcgcaagctctcaatcatttcccatttgcctccgggcagcacgtttttctccaccgttcgcacggtgcgctcatccccctctccctggatggtcgtcaccttgttgccctccgtccttcgctgcgttcggaagacaggcatcccttccctctgttcggcgatatccatcacctgcacgccctggtcggagctcaattcatagctgaccgtcttgtagggagttccggtgccggcaaagccgcgcgcattcttgctcacctggccgggatcgtaccattccagggtgagcctgttgccttccccaaccgcctggagcagtccctgggacttggaccagatgctttgaatggctcccgtggaaggatggcggttcaccttcatctgacgggaataatcttccgccgtggtttccacgccggaggcggagaccatggagacgacctttccggtggctgccgagaagcgcagggtgcgcccattgctctggaccatgtccagataggcgggagagccgctggtgcagggagacttgtcggcattcagcttctgaaccttgtagttcaacttgcgcgaacttccggagacggaggcttcggcatggccgtcagaactctggaaggagatggaactgcccgtgggtcgtttgacggagatctgtccggtttcgggattgcaggaggcggtccattcgaggggatgcttgtagcgcagggtgatggaagagagggcggaaggttcggcaagggtgcgggaaagcgtgggattacctccttcacttccgcctccggaatcgccctcgcccacttcaagcagtccttcgcagtcgtcggctccatccgggttgccgccgaagaaatgggaggtgttcttgctgcaatcggactgttcgatgtcttcgtcgcaatcacaggaacaggggcacgggcaaccgccttcctccggctcgctggaggaagaagagagggaactggaactactgctggaagaggaactggagctggaagaactcgatgaacttgacgaggaccaggaagaactgcttgacgaggaagagctggaagacggagcgctgctggaggaatccggctcctggggcaccaaggaactgctgtggaaactggaagacgaccagctgcttgaggaactggacgaggaagaactcgaactgctggaggacgacgaactggaagaagaaggcggcgcgctgctggaggaatccggaggctcgggagccgaagaactcggctggaaactggatgaagacgaagagctgctggaagaagaactgcttgacgaggaggagctggaactgctgctgggcttgggatcaaactcaaacgaatctcctccccccgccgaactgctcgacgagtccccttcttccatctcctggtacaggttgaccagagtcaggacggtttctccctccttgtcggcgggagtgttttccgccagcaggtaataatccaggtcgggttttccttccttgtcgcatatcagggcaatgcagaactcggcttccgacccctggtcgggctggtgttgatggacgatatggcaccagtagtatccctgttcaaactggatctggcggcggaggggggtggaagagcccggctccgtggagagtttcagatccttggcgggaatggaaagggaaatggaagagtgggcgtggaggtggagaaaacaggtggcgggagccatgaccttgaggtatccgaaccattcgtggcgggtaggggaggaagcaatccgtttggggataaggacgggagcggagaggccattgaccaggaagttgccctgaggctggccgttggggtacatgggaatgaaggggtagacggtgtccatggcgccgatgttgaaagtgttgttcatgatcttgaaattgaagttgccaaacaaacacagccagaatggggaacatttcctaccggtgaaatacgcctgttacgttatggaaaaaagatgaaaagcttcatggaacagttgtttcctttgatttatttctataattactgggtacagtcatataagggaaatcttccagagccgccgccccgagcttgattaataccagaccgcttctgattaatttccagaaatcttgaatagggtatagatggaatccgtgtttagagtgaacatgatttcaacttctgaggtattgttagattggacgaaaacggtgatggtttcttttgccgattttttgttgttaaaagtacactctagaattcgaataatatggatttgtagttatttcttgttactgagggcaggaagacaaagttttttattttcaactctcctatactttttcttatctcttttgaaatcatcatataaataaattcaataatttatatttaatttcatgaaagctcaaaggtggagaacctgcaaggagtgattggttcgattttacggaggttattggcagggtttatgtttgatctttgaaaattctgaaatgatggcacagttttatggaatgaaagtcgttgcgcgttgtctgactaaaaacagtccttcccgttttaaaaacatgcaaatatcattgttgaccttgctggtccttcttctccagactttttcggccatggcgcagcaaccggaggtgcagagcgccgccagggacgccgtggagtggcggcaccatatccatgagaatccggaattgtcttttgaagaatacaagacgagcaattatgtggcggacctgcttgcctcgttcggccacattgaagttctgcggcctacgaagacctccgtggtcggcattctgcgcggcggaaagcccgggaaaaccgtcggcttccgggcggacatggacgctcttcccgtgcaggaggagacaggattttcctttgccagcaaaacaccgggcgtaagccatgcctgcgggcatgacatgcacacggccatgctgctgggaacggccaaggttcttgcctccatgcagaaggaattgcccggcacggtgtatttcattttccagcccggggaggaaaaatcgcccgggggcgcccttccgatcatcaagagcggagttctcaaaggcgtagacgccatcttcggtgcgcatgtgatgcccaatgaacctgccgggtccatcggcattctgccggcgggggctgcctcttcctcgtcggacggttttttcctcaccatccaggggaagggttcccatggctccatgccgcagctgggcgtggaccccatcgtcacgggctctgaaatcgtgatggcgctgcaaacggtcgtctcccgcaatgcgacgcccggggacatggccgtgatcaccgtgggaaaattccagtccggcaacgctcccaacgtcattccggacaaagcggtgctgggagcctccatccgttccgtaacgccggaaacccgcaaactgctggaagaacgcacccggtccgtcatcgaccatgtatgcaaggccaatggagcgcagtacaagctggattacgttctgggctatccgtccatccagaataacgctgccctgcgggaactggcgaagaaggcggctgttgaagccgtgggtgagaagaacgtttttgattctcccagaataccggccagtgaggatttctcctattatgcgcaggtagcgcccacttatttcatgaccatcggttccggggacggccctgcgaatcacaatcccggattcaaggcggacgacggagcgattctcaacggaatcaaggcggaggtccggattatcctggattacctgaactccaaataaaaggaggaaggcaacaagggaaaggcccctattcctgaccggagcagcgggcggcctcctgcatttcccggatgcattcctccattagcgcggcgtctatttcatggacgtccttcccccggcctatcccggtaagcatcaataccgtcaaatggccgccaaggtgctcacggaaggcttccaggcccttcagcacttcgcatgcgccatcctccgtcctgcgggagagcagagggtggaacacgggcagtcccagggctttcagtacggagacgattctttccgcctccgcagcaggcagccatcccttcctgacggaataaaggatgtccaggcacatgcccacggaaacggcttcagcatggcccagcgtgtagccggacatggtttccatgtaatgggcggcccagtgcccgaagtccagggggcggctggagcccagttcgaaggcgtccccgccgcatgcgatgtgtgaggcgtgcagcagcgcggaacgctccacggcatattccagcgcgtcccgctcgcaggcggccagtgcggcatcattcgtttccagccagttaaagaaggaggcgtcttttaccacggccaccttcaccacttccgccaggccggcccttttaagggagaggggctgggaatgaaggaacaggaagtcgttaagcgtggcccaggctacggcgaaggtgcccaggtagttcttctgccccatgaagttgattccgtttttgacgcccacgccggaatccgcctgggaaagggtggtggtgggcacgcgcagcagccggatgccgcggtgggcagtggcggcggcaaagcccgctacgtccagaaacgccccgcctcccacggcaatgatgtaggaatggcggtcgatgcccgcttccacaatgtggcggagggccttttcccacgcggcaaagccggttttggccacttccccgcccggaacggaacggcagccggcataggccagttctccggcgttcttttcaaaataacggtcgatgtccgccgggagctgaggataaaaccgttccagtccttcctccatgaggacgaggacgcggcctccgggcctctgctccatcaggctggccagcgcatcgttttccggacggaaggctccgtgggtaaagcccgttctatagggaaaatccagccggatattcagcgtatgaagggacatttcagaaggaatgcaatggaatggctcgcggctttcctaatccctgcggagcacgggaacagccctcatctggatgaagcggtccgccttggcggcctctttctgggacatgtacatggtgtacggctgctgggccacctcaatgcggtgcgtgccgccgggggcgggaaggtccaggagctggttgaggtgcctgaagcttttcacctgcacgccgtttactttttccacaatggaggggctcatctgggcataccccagcgtggcctgggtggggagcgccatcaggaagactacgatttcatccacacccttcttccggatatcctccttcttctgaatggcttccaccaggttgagggggggcggttcttgctgagtttgttgatttcccccaccagggcgcccgtcagtggaacgaacaccaggccgccgtaaatgcggtaggggggattggcaatgaagggggaagggttgaccagatccccctccagcgcgctcctgtccagtttgacgtccagcgtcatgggttggctgacgccgtccttccccttgcggcggatgcccagcgtaatgatatcccccggcatggcggagtcacggaacaggacgttggcggaaacggggcccagcgcggggtccctgatcaggcccttgctgtccagcggaatgccgttgacgctttccaccacgtctccgggacgcacgcctgccttgtaaaaggaaccgtagacaggcagtttcaccacgtaaaagccgccgccggtttccggaaggcccaggaacttgcggaaaacggggtcggtcagttccgtgacctgggtgccgtccgccgggaagccggtgtaattgccggaccgggcctgttggaggaaccgggaaatcatggtatgggtcacggccagcgccttctgggcggaaggatcgcaactggcgctgagggccaccagtttattatccctcatgatggggttgcccgcgccgcctttcagaggcgtgacggaggatttgacattgtacaggacaaaaggttcgctgttggtgaaagggctggagctttccgttgccagaagggttccggacgtagtgatggggaggccgtcgtcattgaactgccagaaggtcaccttgtcgcccaggcgcggggcgttccccagcgtgacgggcaccagcttgtccaggaaggcggcgtctgcctcgtttttcaggcgcagcagggcaagattggcttccgggtcaaaggcggtcacggtcacgggaaccgtttgggagccgtccgcggaggtcacttccacgaagctggcggaataaacgatgttggccgccgtcagaatattgccgtcccccaggtaaatgccgaagccctggctgtacgccgggttttccttgctccacggctggaccatggcatagccctggttggtggcgttaatgcctaccatggagttggtgggagaagggagctgcgccggagcggccgtttcctccacctgttcaggcggtgtttccggctgctgcccgggctggggttcgggagcggttcgtccggcttcgcgcggctggcagccgccgagcagaatcagggaaccgagggcgaaaagggaaagaattttcatggcggttaacgggcggggttggtgttccggtcaggctggcggccgggaatggcgctgtccagacgggcgtttttcgggatgttgtaggttttggagatgcgcttgttggccgcctccatggccttgccttcaaagatcagggggcgttccccgtttttcagttcaataatcacgtattccggcatattcttcggataaaggagttcgtaggcgtgggtgaggcccttgaccttcacgccgttgattttttccacgatggcgttggagatggagccggacaggcgcgcgttcacttcatcgtccagcaccttggtgatgattaccatgtcttcatggtccacgcagccgccgtcttcctggtaatcccggatatccagggcgacgtccagcatggagatgtctgccgccgcaagcacattgcgctggatgggctggaacaccaggccgccgaagacgatatagcggggcatcttgtcgtattccgccatcagcagatccttggagagagagggcttcatcaccatctccaccttcatgggcttgccgtcgcggatgatatccagcgggagccggtcatccttgaagcagcgttcaatgagctctttcatgctgattttctggccgtccagctcaatcatggcggagctgtccacgtcgtagccgtccaccttcatcagcaggtccccgttgcggagtactccatcggcggaggagcccttgagcactttgccgatcaggacgcccttctcgtcgtccggcaggccgaacgccttgcgcatggcgggattcaggatgggcgcggcctggatgcccatgtccacgtagccgtcatagacgccgtccttgatgtcctccagaaagtggcggatgacgggcgtgggaatcacgtagcccgtgttgttggcgttgttcaggccctggaaggctacgccgatgactttgtcccccatcagggcggggcccccgctgttgcccggattgatggcagcgtccacctggatggtcaggtgttccgtgttgcgggggtgggcatatgtggtgaagtcaatgcgggagactacgccgcgcgtgacggaaagcctgttgccgccgatggggtagccgatcaccctcacctcgtcttccaggtggggcaggttcttgctgaattcaaaaggccggatgcccttgaagggcttggggtcgtccgcttccagcagggccaggtccgcgtcatgggcgatgaatttgaccctggcgggaattttgcgggaatccccgtacatggagatgtaaatgcgttccgcgttgctgaccacatgggcgttcgtcatgaaggcgttttccccgatcaggaagccggtgccgatgccgccctggtagcggcccgtatcccatggagtggcgtagtccggcgtcagggaatccacttcgatcttcacgactcccttgtactggtcattgatggaaacgacggggccggacatgaccttgtccaccccgaagtctgaaatggaaacggccggttcatccgcgtaggaaaaagcggcggcggccaggactgcacacagtccttggaggcaggtatggaagtgcatggtggtctgtagtgaagaggtaatgttgtgaaagtaagttggttatagattgcttttccggctttgggttgccaggctttcctggaaggagttgacttcctccagcaaggaggaaaaacgttccgtcacctcgtcgtctacctggctgcggcggatgtccagcgcggctaccgtctggcgcgtctgttccacgcacagggccatgcgggcggccatggtgcagtagtccgcatcgttttccttctcctggagcaggcaggagagaatgcgcggggtgatgtagcggatgcagtaaaaaatctggttcaggggttccggcggttccgtccggttcctctgggatttgttgatctcccggctgaactggcgctggcacaggtccgtcagctccatgacctgctggaagagggggtggaacatgcaggactgcacttcctgggcctcctgttcgttgaggatgtcaaagaggctgagcatgccggtgcttttgcaggaacacggagtgcccgtttcctccgactgggcgatgttgtcaagcacgtcgtcccagcccatcacaaaggccaggcggatgtctccggtggggttcagcctgtatttctggaacacttcctggtaggcgatggcgatggcttccgcctcccgcaggcgcttgtcccagtggtggtcgggcaggttgccgtcttcctgggtattggcataggttttggaccattccttcacctgggtgcgcagcatctgctggttcgccatgatctgaacctgttcctcgcaggaatccatgatccattcggggagggagaccttgatggaaaaggccgtgctttccagcagcaccatgtcgtggtggctggtgaaccattccaggtacagggagttttccatggttttcttccccttgacgggcatgcggcggctggccgtcatgtcccccgccacgccccggatgttttccgggagctgggtaagttccgcagggagcatccggggggaggggttcctgaaatcgaccaggcatccggccaggtcctggaggcagtccccctgcagggtgatattcaccggatggggcatccccataagctgcagcgcaagcttgacggttccgcgttcacggttgtccagcgtgccgtagtggacgtagtctgtaattctgaaaatcatatggggaggtgggggatagaggggggtagggagaggtcaatgttgaatcagcaggaggctgttacctggggcagttccgcatttttcttttccacggcatccatgttgacaagcagttccgcaatggaatcccagcggccccggctcagggcttcacgggcttccgccggcatccggatggggaaagaaccttccttccaggaggctgtcatgttcaggaggtcgatcgtcacttccgtttccggatgatcggaaatgtaccgggtcagtgcggcaatgtcatccgcggacgcgcacacgcaagggaggccgatgccggtgctgttgccgaagaagatttccgcaaaggattccgcgatgacggctttgatgccggagcgtttgatggtttgcggagcgtgttcgcgggaggaaccgcagccgaagttggagccgcccaggatgatggaagcccccttgaagcggggatcgtccaccggatgggatttggactgtccgttttcgtcaaagcgttcgtcccagaacatgactcccgccagctcgtcaaacgtgatgcacttgaggaagcgggaggggatgatgcggtccgtgtccatgtccggtccgggaacgggaacgcaggtgccggtgatggaggtgaatttggtcagagacataaaggaaaaagttggaaagttaattcagggaaaacacgtcgcgcgcgtcggagaccttcccggtcagggcggcggcggccaccatggcggggctcatcagcagggtgcgcccggtggggcttccctggcggcccttgaagttccggttggaggaactggcgcagagctggtccccctggagcttgtccggattcatggccaggcacatggagcagcccgccaggcgccattcaaagccggcttcacggaaaatgtccgcgatgccttcctcttcacactgcctggcagtcatctgggagccgggaacggccagggcccggatgccgggagccacatggcgccccttgataagggcggctacttcccggaaatccgagatgcggccattggtgcaggagcctacgaagcacacctgcaccggcagtcccttgaggggcatgtccgcggggaatttcatgtattccagcgcctcattgatcatcttccgttcgtcgtcgttcctggcggaggaggggttgggcgtgctgccgctgatgcccgtgttctggtccggggaaatgccccatgtcagcgtcggttcaatggcggctccgtcaatctccacgatctcgtcgtactccgcgtccgcatcggaagcgaagctcaaccagcgttccacggccttgtcccagtccgcgccggtgggggcgaacagacggcccttaatgtattccaccgtggtctggtcggggttcacgtagccgcagcgggccgcgccttcaatggacatgttgcagagggtcatgcgttcgtccatgctcatggcgtctattacgttgccgccgtattcataggcgaagcccaggccgcccttggcgcccagaaggccgatgatgtgcagggccacgtccttggcgcgcacgccgggggccagtttcccgttcacgttgatgcggcgcaccttgagcgggctgagggccatggtctgcgtagccagcacgtcgcgcacctgcgtggtgccgatgcccatggcaatggagccgaacgcgccgtgcgtagccgtgtgggagtccccgcacacgatggtcatgcccggctgggtgatgccgagttccgggcctaccatgtgcacgatgccctggaggccggtggggaggtcgaaaaagcggatgtcgttttccgcgcagttccggcgcagttccttgatcatggcgtcagccgtggcgtccgcgaacggttccgcctggttgtccgtggggatgatgtggtccacggtggcaaaggtgcgttccgggtgacgcacggttaggcccaggtcccggaccattccgaaggcctgcggagaggtgacttcatgcagcagatgtgtagcgatgaacatttgcgttcttccgtccggcaggatgccgacggaatgagcgtcccagattttttggaaaagtgttttccccataactggtataagcatccgtccgttcgggaaccgcgtcaagatgcaaggacgtattgctgacacggtctgtgtcttacaggaagtgtttttttgaacatttcccctgcattcatggtctgaaatggccgcttcccagcctttggcgcatttccgtcttcaagggaagaaggatttttcatgctctccggcacactctgcaccttctgaattccggtggaatttttccttccacagtgttacaaaagtgtctccgaaccggtccagcaggtcgtccttctgcccggattccggcatttcctgttccaggcaggtcatctgcacgccctggatgccgcacggagtgattgcctggaaggggggcagggattcgcgggtcacgttgaaggcgaagccgtgcatggcgatccattttttcacccctacgccgatggaggctattttgcggtcctccacccatacgcccaccagcccttcccggatgcgggcctgtacgccgaatttggcgcaagcttcaatcaaggcgttttccagggcggtgacgtagttgtgcaggtccctgccacagcggttcaaatccgtgatggggtaccctacgagctggccggggccgtggtaggtggcctgcccgccacggttgatttcatgaacggggaaggggagcgcggaaccggggtgcaggctggcgtggtcgcgcgtgcgcccgatggtataaaccccggcatgttccagcagaagcaggtcatcttcccgttccgggtcttcctgatgggcccggaccagttgttcctgaagttccagggtttcctgatagtctgccaggccgggaatgcggatgatgttcatgctgcggaggggcaacccccggtaagtgcggggcttaacgcgttctgcgcacctgctggcccagggcggtgcggtactggcgcacggcggcggccagggaggaggccatgaagttctggtagcgctccgtggagatgagcagggcttcctgcgggttggacatgaatccgccttccaccagaatggccgggtgcttgatggtgcacagcacggaatagcgggcgcgcttgatgccccggtcaaccatggagatgccttctttgatggcgaggggccctttcagcatgtgcccctgcacggctgtagccagggcgatgttcatgctgtcttgggagttgccctggagggcgtcctggcggatgttgcgggacatggaggaggaagtgcccgcaggggccagcgtgaaggtttccaccccgcgggcggaggggccgccgtcattgaagtggatgctgatgaagatggcgttgctgtgcctgttggcgatgcggacgcggtcctggagggtaatgaagttgtccgtgtcacgggtcatcaccacctggtagcccatgcccttgagacggtcccgcagttttttggcgacggagaggttgatgtccgcctccctgctgatgcggttgcgcgtgccgctgtcatggccgccgtggccggggtcaatgactaccgtattgaagctgcggcggttggcgatgtaagtggggcgcaggaccgggtcaatgattttgtgcaggtccatgttggagaccatcagccccttggacggatggtccgccacgggataggaaagcacgaacttcatgttgttcatgaacatgtcctggctgtgcgcctgcatgcgtatctggatcttttccggcacttcgtaaactttctgccgtccttccgtacgttcccgtgtcagtttataatgggtgcgcacctcggacatcggaatgtactgcacgccgttgatggtttccgggttccatccgaaggccgtggacagcgtcagcagaaacatgcccaaaacgccgagcacggctgcaaatgatgtgcgagaggtcggatacataggacgatatcgcgttcagactaacggatttttcatgacgcacaagagaaaagtttccgtgaaagattcttttgcgcccgtctccggaaagagaaaaggcggctcccaaaagggggagccgccttgaatgagtgggaacagggaaggagccggattatttggccgccttctcgtccatcttggccttgaccagttcttcgatttccttgtacaggtcaggattggacttgagggcttccttcgcggcgtccctgccctgggcgatctggctgccgttatagctgatccaggagccgcgcttctggatgatgtcatactccatcgccaggtccagcaggcttcccacggaggagatgccttcattgtacatgatgtcgaactcgcattccgtgaaggggggcgccaccttgttcttgaccaccttgatcttggtgcggttcccggctacggagccgtcgctggccttgatctggccgatgcggcggatgtccacgcgcacggaagcgtagaatttcagggcgcgtcctccgggagtggtttccgggttgccgaacatgacgccgattttttcacggatctggttggtgaagacgcagacggtgcgggccttggagatgaagctggtgagcttgcggagggcggcggacatcaggcgcgcctgggcgcccaccgtggagtctcctatttcgccttccagctcctgcttggtgaccagcgcggccacggagtccaccacgatgacgtcaatggaattggaacgcaccagggcttcgcagatttgcagggcttcttccccggagctcggctgggagaccagcaggtcgtccaggttgacgcccaggcgggcggcgtactgcgggtccagggcgtgttccacgtcaatgaacgcggctaggccgccggctttctgggcctgggcgatggccgtcagggtcagggtggttttaccggaggattccggcccgtagatttccacgatgcggccgcgtgcgaagccgcccacgcccagcgcgcggtcaatgagaagattgccggtggggatgacgtccacttccatcttgacgttgtctccaaggcgcatgatggcgttttctccgaagtctttctggatttgggagagggccaggtcaaggttgcgcttgcgggccgctgccagtttttccgcttcgggtgataaaggtgtttcgttgctcataatatcgtggaaagtatagcttgcgcggcgttattggcaagtgttcaataggtcttcgcggcctcatttcccgttgagaaagaatagaattctgacatgggggaaaacctgtgaaaaccaggtgtttcgctcgggaggaattgaggaaaatatgggagaacgatcccgggagaaggccgggaacggggaaaaaccgcttccggcaggggacgccggcacggcgtcattcctcaattggttccgcaagggggatgtcctcgtaggaatcgtcgaaaatgacggggatattgtgctccggaatcaggttgatggcgctgattttccggtgcgtctggcgtgcgtgccggagagcgcgggacagtttttccacctggtgctccaggccgtaatggctgaaggtggcctggcagtcgttggagaagcgcacgcagaaggaccagtcgttgggcgtggtgatggagacgatgctgggcaggtattccgtcaccgtgccggagagcagctcaatcagcttcatgggcgcttccagctcccggatgccgactccgtagctgagctggccggagctgggcggcctgagcgtgacggagggcatgtgcctgccctggatgtagggcaggtggacctgctccatacaggggaagatgaagccctccttgtccgccagaacgccgtatttggcgtctcccgggtggacgcccagttccgggcagtcaatccatgccacagggatgcgcgcgtcaatgtccaccagcagcgtaggattggaggatatctggcgcttgacggccgcccggcggatggccgggcatttttccagccgctgttccagttccgcagcatccatggaaaagatgttgtccttcgggcctatccccatgacggcgaaagcctgctcggagttgaaaatgccgttgcttttcaacgtgacggtgtcgatggagagccagtcgtacttgaggatgtaatccgtccagaggaagacgatggccccgataaggccgaagatgagcgtgtaaacggtgacgatgtggtacagcttgcgccggaagagccagaaacggtagttcctgcccttgcgctcaatggtttcttttctggcctcccgttccagcaggagcatttccggccttttggcggagcgggggactggcgttgtggctttgtgcgacatcggggggtgtgggatgggcgactccccgccctctgtcaaatattacgctatttccggggggtggctagcgataattccgctattttttcgcaaagggcctcgtaggaccagccggcggcagccgccgccttggggagcaggctggagggggtcatgccgggaatggtgttaatttccagcacgaagggggagtcgtctacctcgcgcagcagcacgtccacgcggccgtacacctccacgccggcggcgcggtaggccttcagggcggcctcctgcaccttggcggcggtttcttccggaaggtccgccgggcagatgtaatccgtgcctccgcccatgttcatccacgggtacttgttgctcaggtcatagaagccggagcgggggcagatgtggatgaccgggagggcttccccgtccagaacgcccaccgtaagttcacggccttgaatgaattcctccaccagcacggtggtgccgtgggtaacggcttcctccatggcggggagcacgtcttcctgcttgtggacgatgtggacgcccacgctggagccctcgcagggaggcttgatgacgaagggaaggggaagggacggcatcacgatgccgccggagcagtccaggatttccgcgcggggggtgggaaccccggcttccagaaataccttcttggattcggacttgtcaaagcacagggcgctggaacgggaaccggctcccgtatacggaacgccgcgttcctccagaatggcttgaagggccccgtcctcgccgaaggtgccgtgaatgatgttgtaggccagttccgtgccttccggcagccggaagtccggaccatgtacgtccacctccgttacgtcggtaaacccggcctggcgcagggcgccgtaaacggactttccggagacgagggatacttcccgttccgctccggggccgccaaggagaagggcaatcttgaggtcgcgcttgagagtgctcatgttgaaataaaataatgaatgggttaaaactggggttcccggtctccgatgacctgagcttccgatttcaggtcaatgccgcggttttccatggcttccttccggatcatgtcaatcaggatggtgatgtcccgcgccctggcatggccgcggttgatgatgaaattggcgtgcacgtctgacacgcaggcatctcccacgcaggcgtttttcaggcccagctcgtcaatgagcctgcccgccgggatttcctccgggttcttgaagatgcagcctgcgctggctcctacgggctgggtaagcttgcgcttggcgcgggcttcttccaggcgctgctccatttcctggggggaagcgggctgcgtctcaaacacggcctgaagaacaaaattatgggccaggtccggaatggaacggtactgggcgttcagttcctcctttgtgtgactgcggatttccccgtcttcatccaggcagacgacggagacgaggtttttaatcatgtccatgcccatggccccggcgttcatgcggaggcttcctcccacattgcctggaatgccgtccatccattccaagccgcccaggccgttctggacggcggtggaaaccagctttttcagccgcactcccgcgccggcggaaaggcggttcccctgaatttccaggacgtcgaattcgcctccggaggggtggatgacggcgccgcgcaggccgccgtccctgacgatgatgttggagccgcggccaatgacgtgcacgggaatgttcctgtccctgcaataattgacggccgtctgcatgccggagaaggtggagggctccagccagtactgggcgcagcctcccaccctcatggtggtgtggcgtgacatgggttcgtacagcttgccttccagggattcgcccgcggtgcgttccagatcctccagcagagccaggtcgcgcgcgatgcgcatgccgcattcgtggacgtttccggcccccagcgtcaggaacaggtctccgggtttcagcgcgttgccgatggcgtggtgggccgtgcccaggtcgggaaggtaatgggtttccaccgggccgtgcctgtgcatggcgtcgatgatggtctggccgctcactccttcaatgggcagttcgctggcggggtaaacgtccgccacaaagacgaggtccgccgcctggagcaccttgccgaagtcgtccgccagcatctgggtgcgcgtgtagcggtgcggctggaagtaaaccaccaggcggttcggctggagggagcgggcggtctggagcgtggcggctatctccgtgggatggtggccgtaatcgtccacaatccggatggtgggggaaaggtatttggtctcaaagcggcgcttggccccggcaaaggaagccaggccgcgcgttatcgccgggaagtccacgcccagttccgttgccagcgcaatggccgccagggaattcagcacgttgtggcgtccgggaatgcccagctccacgcggcccagttcctcttcccctttcaggacggtgaacagagtgcggccgcggcgttccaggatgtccgtggcggtgtaatccgcaccagaccagccgtaggaaacggaattgggatagccggcgcatacgtccgctgcgccggcatgggcgcggcagtaaatgatcatgccccgcgtctgggagcaaagctggtcaaacacggccttgatttcatccaggtccttgtaatggtccaggtgttccggctcaatgttgaggacgatgctatgctccgggatgtagttcaccagcgtgccgtcgctctcgtccccttccgccaccaggtattcgctgtcctcgttccagtgggcgttggtgcccagcacggggatttccgcccctacatagtggcacgggcgcatgcggccttcccgcatcaggtgagcgcagagggccgaggtggtggttttgccatgcgtgccggagaccacgacgcccttcttcccgttcaggatggccgccaggcattccgcgcggcgcatgcagggaatgttcagtttgcgcgcggcggaaagggccggattgtcctcccggatggcgctggaataaatgacgatttccgcgtcggagacggcgtccgctgaatgcgggcaggaaaaagaaagtcccaggctctgtagccgttcggtttccgtgctggtcacccggtcgcagccgctcacccggtgccccatttccatcagcatgagcgccaggccggacatgccggacccggccaccccgatgaggtggagacgtgccggatgttccctgtccatcaggcgtttgcgtaaagtctcaatcatggatggctgcatggtccgtgttttcaatgacattggcgatgcgggatactgcatcaggcgtatccagacgtaaagcacattcattcatggaggccagcagggaggaatccttgaagacttcattcagaaaagccgcaatatcgtccggcgtaagggtgttttcacgcatcatgcgcgccgcgccatgggccgcgaagacgcgcgcgttgtgcgcctggtggtcgtccgcggcgaaggggtagggaaccagcagggcggccttccccatgtgggccagctccgtcaggctggacgccccggagcgggaaatgaccacgtccgccgcggcgtacgcagtcgccatggcggaacagaattcaatgacgtgcacatggggcatgtccgccgtcagctggctgacgcgcgcgaagtcagcagagcccgtgatgatgagaaaatcgcacaagtccgcgcattgccgtgctgcttcaatgaccagtgaattcaggttcctggcgccctgggagccgcccatcaccagggccacgcggcggtcccggggcaggtggagctccgccctggattcattcctgtccttcctggccaccatttcctggcgcaccggggtgccggtgacaatgcatttggcggggttgaagtaatgcctggcttcctcaatgcccagcagcacgttcgtgcagcatttggcggtcatgcggttggcctttccgggcagggcgttggaatcgtgcacgtaggtgcggatgcccttgcggtgggcggcgtaaacgggggggaaggaagtaaagccgcccatgccgatgacgacgtccgcattcacctcgtccagaaggctgcggctgaaacggatggctttgtacagcctgagcccgaagcccagcagggacatggacgggattttgggcatcgcgatggcctcaatggtgcggaaattgagatcgccgtaattcttgctggcctgcgcatccaccttcttctgggaaatgaggagggtgacgttgtggccgcgctttttaagttcctgggctacggctatgccggggaaaaggtgccccccgtgccgccgcaggcaatcacgatgttcagggtgggacgcgagggagagggttcagtcataatcttacgtcaatggagcgttcgtctttgcgggtgatttcacagttgggctgtgcaccggtggaaaatctctgaatgctggtgagcatgcccagggcggccagcgtgaagaccaggttggtgcccccgaagctgatgaagggcagcggcagcccggagttgggcacggcgttggtcaccacggcaatgttcaggatggcggggcagaagatgatggcgacgatccccacggccaggaaccggccgtaggcgtcccggcactgcatggctacgccgatgcccgcataggtcatcaggaaatagcagagcaggacgaacatggttccgtaaaagccgaactcctccccaagcggggcgaagatgaagtccgtatgggcgaagggaagcgtgccgtgcttttccgcgctgttgcccaggcccaccccgtccaggccgccgcgggacagggcgatggaggcgcggtactgttggagccccgcgcccaggcggtgggcgtccaggtccttccaggccaggaagcgttccaggcggttggcgttgctctgcaccagaacgtacagggccgctccggcgagcgctagggcgccgcccaggtaaatcttgcgcgtgccggccacgaacatcacgcagaacgcggccagggccagcgctacggaggtgcccatgtccttttcaaaaagaatcagcgccagcggaatgccgaagatgacgccgggcatcacgaacccccaccagaaggaggtagtgcggtcccggtacagggccagccagttggccagcgccatcatcatgcagagcttggcgcattcactgggctggaactgcatgccgatggtgatccagcggcgttccccgttgatctccttcccgatgcccggcacgtagcacagcaccagcaggaagcaggcgaaccccagaatccaccagatatacttcctccatatccggtaatctatccgggagaggatcatggcccccaccagccccgcgcaggcaaaggcggtctgcttgaacaggggctcgtacgggtgcttggtttcttccgcccaggccgccgtgctggataccatcaccaggcccacgaccagaaggcagatgacgaaaaaccagaccagaatcatgcagactttggaagacatggcggcaggggcgggaagagaaagaacttacttcttgggaatcatgatcttttgaccgatcttgaggcgtgctacgtcccggtcgttcatcttgttgaatttctggagggagcgccagttcatcttgtacttgcgggcgattacggagagggtttcacccttcttcacgatatgcgccacgccgtccggttccgtttccgcggcggcggttttttccggcgccatcttgtcgccggggcgtgccggaatgacgagcgtgcttccgctgacaaggcgctgcaccctgggattgacggctttcaggtcattgacggccacctggttgtcacgggcgacccgttcccacgtatcccccgtgcgcacgatgtggcgcgcaggacctgccaccggagcggcgtccggaatgtgttcctgcacggcgggagccggccgcctgttcgggcgcgcgtccaccacctgttccggctgcgtgatggtgaccggagctgcgggagcggcctggggagcctggggcagaaccgccgggggagccgcaggaacgggcgtctgggaaacggtgggcggcgcgggaagggcggttgccatttccacggtctccgtcgtattcctgaaccaggtgctgcggacatagacgccgccgataacaagaagatggagaagaaggaggacgacgagccagcgcacgacggtgctgctgggagcgtcatcttcaaattcggagacgcgtgcgcggtatctgctgagcttggcacggagcacggtgcccattttgcgtttcggacgggtgcgtccggtcggattgtgatcgggggtcttggtcgttttcatgatggtgggtttctggtgggttgtcaggaaaggggggagagggcgttcaccgcgtcccggaaggcctggccgcgctggacgtagccggtgaacatgtcaaaggaggaggtgccgggggagaacaggacggtgtctcccgtcctggcgcgggcgcgggccttggccacgcagtccgccacgtccgctgctttttccgtgggaaccacgggggaaaaggcgtcctggagctggtccgcaatctggccgaataccacgcaggagcgcaccttttcctttagcatgtgccgcaggggcaggtaatccagtcccttgtccttgcctccggcaatcaggatgaccggggaattctgggatttcagcgctgcttccagcgcgtgcaggttcgtggccttggaatcgttcagccacagcacgccgtccagcgtgcggacggtctcgcagcggtggccggggggagtgaactccttcaatacttccgcagccgtttccgcgggaatgcccaggtggcggcaggctagcacggcggccatggcgttttccgcgttgtggcgctggtttagggtggtatccgccaggttcagcaggggcttgtctccctccatgacctgcggttcccggtaataaaggtccgccgccggatcttccgaactgaaggtgcggacgggggctttcaggtgcgggagcctttccccggcgcgcacgacggccaggtcttcttccgtctggttgtcgaaaatgtgcagcttggcgtggtagtaatcctccacggacttgtagcggtccatgtggtccggcgcaaagttgagccatacggccacgtccgggtggaagtcacggatggtttccagctggaaggaactgacctccagcgccagcacgtccggcacggaatcccggagcaggatttccgccatcgggacgccgtaattgccgcaggcgacggccgcctttccggcgcgaagcaggattttttccaccagggacgtggtggtggtttttccgttggtgccggtgatggcgatgatgcggccatggtagaagcggcaggccagctccatttcaccgatggtttccacgccttccctcccgaaggccctgacaaaggggctgtccgtctcaatgccgggggagatgaccaccaggtccgcacggaaggcccgcccgtcttcctccgtggcggcggcgtgcagcggaatgtcttccggccagccgccgacggaggcggaggcgtcaaacacgcgcacccgggcgccatgcttcatggcgaggcgcgccgcggcgcgtccgcttcttcccgctcccaggacggcgatgttgaggttgttgagctgcatgttcgtggttgtcaggcggtggtgatcaggaaaaggcccaggaacgccagcaggaggctgatcatccagaagcgggcaatcacctgggtttccttccatcccttgagttcaaaatggtggtggatgggagccatggcgaagatgcgtttgccgtggcgcagcttgaagctgcctacctggagaacgacggatgtggcctccatgacgaaaacgcccccgatgacgatgaaaagaagctcctgcgccgtgcagacggcggccatgccgaatgctccgcccagggccagggagccggtatcccccatgaagaccctggccgggtagcagttgtgccacaggaaacccaggcaggcgcccaccagggccatcatgaaaacgctgatttcccctgcgccggggtggaaggggatgtccagggaatccgccatcagccagttcccgcaaatggcggcaatgatggcgtaggagatgcccgtggtgacggagcagccggaggcgaggccgtccagtccgtccgtcaggttcaccgcattggaggcggacatgaccaccacgacgccgaagggaatgtaaacgtaccacggcaggttcacctggccgtagaacggaatgaacagggaggaaacgtagtcatgcagttccacgcgggggctgccttccgggtacaggtacaggaacgtgacgcccgccagcccggccaggaactggatgaagagttttttacgcgcggaaatgccgtccgaggttttcttggccaccttcaggtagtcgtcccggaagcccagcagtcccagcgccagggtgacgaacaggcaggagatgatgaagggattgttcattctggcgcacagcagggtagccgccgtcatggagcctacgatcagcacgccgcccatggtgggagttcccgccttggctccgtggagttccgccagcttgtgcacttcctccgcggtcctgatgggctggccgattttcagggaaatcagcgcgcggattacccgcggggcgaacatcatcgtcaggacaaaggagatgaggcaggccagcagggctctccctgccggttctgcaagcgcccccgcggggctgagctgttcaatgaaggaatgcataaaatttactggggcggaaaggtgaggttcatgacttgctccatccgggcaaggcggctgcccttgaaaaggacgatgtctcccggcgccgtgtggctgcggagccattcggcggcttcctctgcggagccgaagttcagtcctttggtggatgagttcggagaaatggcgtccgtaatccgggcggcgtccgttcccacgctgaccacgcagtcaaagcggagcttttccgccgtgcgtcccaccagcgcgtgcccttcttcggaaaacgttcccagttcccccattctgcccagcaccgcaaagcgcctgccggtgcaggaaagctccgctgcggtgtgcagggcggcctgcatggaatccggattggcgttatacgtatcgtccaccaccagaatgccgttggaccgggtgcagtggagcctgccgcccgtgagctgcgcccggttgaggccggagacgatctgctccttcgcaagacctgccacccagccggcggcggcggccagaagcgcattggccaccatgtggcggccgtggacgggcagttccaccacctcccggcagaaatcaggaatggaaagggtgaaacgcgtcccattctccgtcgagaccgggttttccgcgcggacggttccggagtcaatgccgcactcaatgcacgcggcgcgggtggactggcggatcatctccgcataatcgcagtccgccgggaaaatcatgaagccgtcttccggcaggcagcgggctaccgtgcatttttcccgggcaatgttttcccgggaacccaggtattcaatatgggaggtgccgatgctggtgatgatgccgatcttcgggcgcgtcatttcacacaggggggccagttctcccggatggttcatgcccatttcccacacggcggcctcgtccgccggggaagcccggaggatgctgaggggaacgccgatgtggttgttcaggtttccctgcgtggcgatggtccggagtccctgggaaagaacggaggcggtcaggtccttggtggaggtcttcccgttggagccggtcaggccgatggcggtgagggtcagcccggcacgccaccaggaggccagctgctggagggctttcagcgtatcctccaccaggatgacggcgcaggaggggtccatcccttcctccacgcggctgacgacgactgccgccgcggtgcgggaggcctccggggcaaacaggttgccgtcaaacttttctccccccagcgcgaagaaaacggcatggggcggcagggcgcggctgtctgtgcacacgcctccggaagcgaccctgtcaaaggggccgctgaccagttttccgccgatggcgttgcagatgccgtgtgccgtgagggaggtcatgaaagatgaaatgatgtgttatgcctgcgggaactcttccctctccttgatgaacatgttgcgccgcacttccttggcgtcgctgaaatcgatgcgtccggtggaaagctcctggtaattttcatggcccttgcccgcaatcaggacgacgtcccccagccgggcctgttcgatggccgtggcgatggcccgggcgcggtccggaatgatggcgtacctgccttccggcatgcccgccgtaatctggctgatgatggagaggggctcctcgctcctggggttgtcggaagtgacgatgcaggcgtcagacaggcgcgcggccacggcgcccatcagcgggcgcttgcccttgtcccggtcaccgccgcagccgaacacggtaatcaggcggcgggagcagatttccttgagcgtcctgcagacgttttccagggcgtccggcgtgtgggcgtaatcaatgaagatctgggcgcctccggggtgggtgaacaattgcagtctgccgggaacctgcggaatgttctggaggttcgcgatggcgtcccgtaccgggatgccggcgcagatgacggccgccagcgcggccaggctgttgtacatattgaatttgccgatcaggggcacgcgcaccaggtagctttttcccttgtattccagttcgtattcgctgcccttggccgtggcgtggtgcaccagcatgcggaaatccgcgcccagggcggaaccgtaggtcttgacggccatgcggccggagaacatttccgccaggcggcggccgtaggcgtcgtcaatgttgatgacggccacgggcttgcggcgggccctggtgtcctgcgccatctgctcgaacaacttcgccttggcctggaaataattctccatggtgtggtggtaatccaggtggtcctgggtcaggttggtgaaaatgcccacgttaaaattaatgccggccacgcgttcctggtccagcgcatgggaggatacctccatggaaacgccgcggcagccgttttcaaacatctccttcagcaggtgttccagctccagcgggccgggcgtggtgtgggtggagggggtgatttcctccccgttgtcataggcgatggtcccgatcagcccggcgcgcagccaggactgcttcagcagggaatgggcgatgtaggccgtcgtagtttttccgttcgtccccgtcacgcctatcatggtcatgtgacgggagggatggccgttccaggccgcgcccatcaggctgacggccaggcgggaatcgttcacctccacccagctgactccggcgtccctggcttccttcgtgcagggcatttccgcgacgacggcgcaggctccgcggcggatggcttccggaatgaactcgtggccgtccgcctgggttcccttcagggcaatatagcaggagccgggcagaacacggcggctgtcgcattccagatgggagattttcacctggggggagccggtgagcgtatgggcgggaaggtctttgagcaaggtaagtagcttcatgataggattatctgcgcggcggtttggacggggaggaagaggcttgggcgcgggaggcttttttgtccgcctccgcggaaggggtattcttgggaatgttcatggccgccgccaggcgggtggccagtttctggaagaccggagcgcatacggtgccgccgccggggtggcagtgcttggaggtggggtcgtcaatgacgatgaggcagacgaaggccgggtcctccaccgggagcatccctacaaaggagacggtatagcggttgtcaaaatagccgcccgtgggcttcaccttgtgggcggtgccggtcttgccccccacgttgtagccttcaatccgcgcccttttggcggttccgtccaggtccgtgacgtggaacagggcgttccggaggttccgggctgttttaacgctcatgacccggcatacttccacggggggggagggctggaaattcttgtcgtccacgtaaatgccgtccaccagccgggggcgcatgcgcacgccgtcattcgcgatggcggcgtaggccatggcgacctgcaagggggagaccatcagggaatagccgaagctgatgcgggagaagttgacgaagttgctgccgtcctggcactggctgttggtttctcccggcaggtcgatgcccgtcttggaggaaaagccgtacaggtcaaaatactttttatacgtgggccagcccgatttcagcgcaatgcggaaggctcccgggttgctggactttttcagcacgcccgccacggtcaggccgctgtagaaacggggggcgtccgtgacggggcgggagccgggcaccatgtagggcgtgcagttgatcatggtatcgaatgtggcctttccgctgtccacggcggatgtgacggaaacgattttaaaggtggagccgggttcgtacagggactgcacggcgaagtggtaggcgccttcctgcaggccctcgcgcgtatttagattatagtggggacggctggccatcgccagaatgctgccggtcttgggctccacgacgataatgcagccgcggggcttgtgggtctggtccgtgtaaaaggaaatggcggcgtccaattcctcctccacgatcgtctggtactccatgttcacggtcaggcgaacgttcaggccgtccacggcgtccttgaaacgggaatccgcggaggggatgatgcggccccggctgtccttccggtactccctgatgccgttgtggcccagaagctggtcgtccagctgtttttcaaggccggaaagggccacggggcgcggaccgctgtccttcgtctgggcgatgtagcccagaatgtgcaccatgcattccggcacggaataaacgcgcttggaagaagtctcaaaccggaacccctgcacgcgggcgttctggatggcctggcgcagcagttccgctttttcctcggacaggttcttggcgatgacgatgcgcttcttgggaatctccccgtccttttccaccgtgttgatgatgtcctgcacgctcatgtccggcaggaagggggcgatcacgctggcggcgtattccagatgggcctgcacgtattttttcaccatctccggctcataaagctcttccagcttcttcctggccatgtccaccccttccgggccgtcctcaggctcttccagtaggattttcgccagattgtgctccttgctgccgtccttcttgctggccgcctgtcccaggattttgctgcggaaaccggaaacgagcttctctttctccttgtccgtggcggcttccccccagaaggcggagtggacggccttggaataggcaagcgcccagctgatggtcttgggatcgttcaggtggtagccgtccgcaatcagctcggaactctgcatgttgttggtgaggatctcctcattggcgtccatgatgcggccgcgctggggcaggagaacctcccgttcaataatgccgccgctggggactccgcccgttttccggggggaaaccagttggaggttgaccagcgtcagcatcagccagatgaccgcagcgcccgccacgccgcacaggacgaggcttcttctggcaaatctggacttcgtgatcgtggtcatgaacggctcggcgcatttaattgcctgccgcggcaatgcgggaggcgttttcggaagaaatgtattctacggctgagggctcgataggctgaaggttggacttgtcctgggccagcctgtcgcggatggcccagcggctggtcagggaggaagtcttggaacggtaatattccttcgtgagttcgcaggaagcgatctcctcgttcatttgcttgatgtcgcgcgcgacctggatctggtcgtttttcagcacggcataagtgatgcccgccccgcaggtgagggaggcgaaggcaatgagccacatgatcatgctcacgctgatctggtggccggtgaaacgctgtttgaatcttttcatggcggtggcgaaggagagatgggtcagatgattttttccacgccgcgcaacttggcgctgcgggaacgggggttggttgaaagttcttcttctcccgcagtgacgggcttgcgggaaagcaggcggaagcagtaatccgggttggggcgcggagccggccattccggacggtcgatttccggacggctccggaggtcgaagaactgcttgaccctgcggtcttccaggctgtggaaggtaataacggccatgcggccccccttgcccagcaggcgcacggaggaatccagcagcgcgtccagcgcgtccagctccccgttgacggcgattctcaaagcctggaacgtacgggtgccgggatgctgccgccccttgcgcggaaggacggattccaccacgcgggcgagctgggcggtggtggtgatgggagccagggaacgcgcctttacgatggcgcgggcaatggcacgggaagcccgttcctctccgaactgccagaggatgtccgcgatctcttcttccggggcctcgttcaccaggttgcgggcggaaaaggcggcgcgggtgtccatgcgcatgtccagcgggccgtcttcccggaaggaaaagccgcgggaggcggtatcaagctggtgggaggaaacgccgaggtccgccagcaggccgtccacctgggaaacgccctgctgggcgaggatgctttccacatcctggaaattgccggcgagcaccttgaaacgggagccgaagcgggccagcttcagcgtggcggcgcggcgggcgtccggatcgcggtcaatgccccagacggtagcgccctgttccagaagaaatcccgtatggccgccgccgccgagcgtacagtccacgatcagtttgccggggcctgccgccagcatgtccaccgtctcatgcagcagaaccgtaacatggttgaaaccgttgccggaaacggctccgtccgtttccgcgtcagcggaggcggaaacggcgtcatcccccagttcggaaaccagggcgtccactttggctccggcttccggagctttcagggcttccgtgtggtacacgccttcccagttcatggagggggcaagcgccttccaggaacagaccagctcgtccacccccttctcctccgtcaactccgcaatcacgtgcacatggttgcggcagatgctccatgccagcacgcggcaggacgtttccgccgcaagggcatttgccagggcctgcgcctcctccgtgcggacatgcgtacccgcgcccgcgcgtaaagaaagctcaacatggccgtcaaaagcccggttcaggctggaggacaatgcgcccaatttgccataagcgcccttctgtcccgccagggacatttccgcggtgatgcgcgctttctcctgctgccaggcgatcatgtcctgcgccggaagggcgtcgtgcccccagaaaacaatggaataagccgtaacctccgcattcagcccggttctggcgccgacgcccaggccggaaacaagccagcccgggcgcagcgcaagcgttgcgtagggatgggcctgatgcgtgggcggaatggtagggtctgggggcatgaagggagatcagagaatgccgtaggattggttgatatcggaaatattggcgttttcacgccgggagacttcttcatagagagaaggttcccataattcgaaatatcctctccgcgcggcgagccggacggaggaactgagctgtgcgtgttcgcacatttgtttgggtatcagtagtttgccctgggcgttgatgatggcctccacgcagttggcatataatctgccgatgaacaggtcgatctgcgcttccgtgtagccgggcgtggcttctatcttgtcaatgagttgctggaatttttcccgcgtataggctttaacggtcggcaattcaaggcggcggccggatagcaggagcagggcgcaaccttcggtaggcctccattcagccggaatcgcaatccggtttttggggtccagcttgtgcgtgtatgcaccaaaaaggttgtctgatacactgctcatcgcatgcaagtacactacgtagtgacttcaatacactttaatgcacctgaaatgtcaaccccgtactggaaaaaagtattttttcttgtgttcatgtcgtgaaaaaaagcattgatccgctcttgcgccgctccgggaccggtattatattccgcgcatgatgcagttttgcgtgttgggcagcggcagcggaggaaatgccaccatcgtcaaggcgggggaaaccgtcctgctggtggatgccgggttcagcgccgccaggctgcgggataaaatgaaatccgccggcgtggaaccggaggagctggacgccattctgctcacccatgaacacacggaccacatgaagggcgtgcatcagttcaccaggaaatacaccgtgcgcgtctatgccacccgccatacggccatgtgcgttcaggaaaaggcgccggaagccccctgggcctactttgaaaaagggcagtcctttaaaataggggatatcgtcatcaccccctttgccacctaccatgacgccgtggacccggtgggattcaagtttgaaacggaacggtccagcctgggcttcatttccgatacggggcaggcccccggctgcgtggcggaacacctctccatggtggacagcctggtggtggaatcaaactatgatccggacatgctggcggccacccccaagcggccctggccgttgaagcagcgcatcgcctctacgcacgggcacctttccaatgaacaggcctgcgacctgctgaggcgcatcgcccatgacgccctgaaaaacgtagtgctggcccacctgagcgcagaaagcaattctccggaattggcagaaagcctgatgcgtgctaccctgcatgacatgggactggcttccacctccctgttctgcgccagccaggactcctgcctgccgtggatacgggtctgctgaatccgcctctttccttcctcctgccgccatgttcctctccatctgtgaaatcatgagcacgatcattggagccctggcgggatccattgcttcttcgcgcgtgaaaatggacctgttcggcgtgattgtctgcggcaccctggcggccctgggcggagggaccgtgcgcgaccttctgctggacattccggtgtactggacgctgccctccggggaaatctttgtcctggccgccgtcgtcaccagcctgggaaccttttacgtggcccagaaatacccgccgcccatgggcaccatccgcgtggcggacgccatcgttctggccctcttcggcatgatcggtacggaaaaatcctacctccacggctatacgcccaccgtttccgtgatgatgggcatctgcaccggcgtggcgggcggcctgctgcgcgacgtgctcaccggaaacgttccctacgtgtttcgtcccggggaactgtacgccaccgcggccctcctgggaggcgtggcgtacgcggtgctttactacttcgggatcgactcctccacctgcttcgtgacgggcttcgtggtcacgctctccgtgcgcctggcggccatccgctggaactggaacctgccttcctacattcccctgttctccccggaggcagaaccggaagccatggaggaagaggaaaaggagattctttccgggaaacccggcggacggtaatccgcgctacttgtggaagcacccttccatgcaatagacggaaagcttctccaccgtcccgtcccgctcgcagcaggagcgcatgttgcagtgcgggcacaattcccgtacatttgctacgtccagggttccccgtttttcgtgaagggaataaaggtacttcaggtatttcccctccgcgatgcggtggtggctgtccttttccttcagccccttccattcgtacaggcgtttcccgcccttggaggaattgcaggacttgcataccctgacaacgttatccatgatatcttctcccccgcagtcgcggggcaggatatgctccgtggtcaaattctttttttcgccgcaataaatgcattctccgggatgttccatttccctgacccattcgcgaacggaggaagaccaatgtatggtccctgcgcaaagctccttccacttgctcataatcatgccgtaattggcctttccgaagccggaagaagaggcaatgattttggcatattggtaataaatgatctggcggacggatttgacggcgggaggaggcatgatgaggatataaaagctacttgttgaatgatgctgtccggattttccggagctttacttgcccaggcagaaggaggaaaaaatggcgcccagcacgtcctccgtatccacggctccggtgatttcccccagatgcgtcagggcttccctcagttccagagccgtgaattccgggctctcctgccgggagatggattcagaagccagccggacatgctccaggcacaggctcagttcatgctggtgccgggcgttgatggctaccagggagctgcccgtttcaccggtcagggaagaggcaaaggcctggataatggcttcttccaattcctttctgccttctccggtggcgcaggaaaaacggatgccgggaacggcctcccagtccgggtggattcccaggtcgcacttgttcagaatcagcagccggggcgcggtacgggcggccgtggggaaagcctctgtccagggcgcggaggcgtccgccacttccagaaccaggtccgcggattccagcgccttgttggtgcgggtgatgccggcctgttcaatcacatcggaagattcccggacgcctgccgtgtcaatcagccgcagggccagcccggcaagctggatggattcctccaccgtgtcccgcgtggttccggcgatattgctgacaatggcccggtcataccccagcagggtattcagcaggctggactttccgacgttgggcggtccggcaatcgcagtgcggattccttcccgcagcaggcggccgccctcggcggtccgcagcagcccggaaagcttttcctccatgctccggagccgcgccagcaaaccggaagcggtgtccggggaaatatcttcatccggaaaatcgatataggcctcaatatgggccaggacgtgaaccaggctgtccttcagttcgtccacctgggagccgatgcccccgtccagctggctttgcgcggccttcagggccaagtcgcttccggcggaaatcacgtccatcacggcctcagcctgggtcaggtccatgcgtccgttcaggaaggccctcttcgtgaactctcccggttccgccggggaggctccgcactggtaaaggcgtttcagcaggcggtccgtcaccagcatgccgccatggcaggagacttccacggtatcttcccccgtataactggccggagccggaaaccaggtgatgagcgcctggtcaatggcggctccctctgcgtccagaatgcgggccagcgttgcccggcgcggctggaggcgtttcgtgaaggccgcgggggtgcattgtttcaggacggccatgcagccggggccgctcatgcggatgacggcaatggctccctgtcctgcggcggtggcctgcgcggcgatggtgcgttccgggtcaatcatggttctatggattcaaaaaaaccgcccccgagcaacttgccttcgtcgtaaaaggcgcagacctgtcccacggccagcgcccggaggggcgtgtcaaagctcaggcgcaccttcccttcttccagatattcgcaggaggcccattccgccttggcgcggtagcggggctgcgccatcacgcgggagggcaggggcgccagcatattggaaatgccgccaaccaccgcatgggccgcatacagtccctgcgtggacgcgtcttcataccccaggatcaaacggttgcgtttgacgtcctttcccaccaccacgtaggcgattccttcccgcggggaggcgacgccgtggcctttcctctggcccatggtgaacaggtgcaggccgttgtgggagccaagcgtcttcccctccgtatccacgattttgccgggcttgtccggcaggtagtggcgcaggaagtcgctcatcttcacctggccgatgaagcagatgccctggctgtccttcttgcgcgccgtgggaaggccgtatttgtccgccagcacgcggacctccggcttcagcaggtcccccagggggaacacggcgcgggctgtctggtccggacgcatcagggacaggaagtaggactggtccttgttagggtcccgcccgcgcaagatgaaggagccctgcggcgtatccagcctgcgggcgtagtggccggtggctacggagtcaaacccctgctccagggcgtaatccagaaagacgccgaacttcatttcccggttgcacagcacgtccggattgggcgtgtatccggcgcggtagccttcaatcaggtaattcacgatgcgggcgcggtattcgtccaccaggtcgatgacccggaattcaatgccgatttttttggcgacggccagcgcgtcctgaatatcctgttcccacgggcattcgccgggaatgccctcgtcattcacccagtttttcatgtaggctcccaccacgtcatgcccttgctccacgagcagggctgctgccacggagctgtccaccccgccggataagcctacaagaatacgtgccacgatgttgaaaaagatatgggtgtgatagggaacctgcgtttgggaagtctttcccgcctgcccctgtaaatcaaagatgcccccgcaagccaagacaaaaagcggggaagacgattattcgggacgtaacctgggaaaacaaggggatgccttacagtctttttatgcaggaaagggtttgcactagtgacgcttttgttgtccggatttggatgccgctttaatttttctgtttgggcaatcccttgtaaaggtaggccgctttcggcacccggccgacggttctgtccagcagggccggaatgtccttgtccctgtatccggccagccgcaggtattttttgacctcctgggccttggtcgggaagcaggtcatcagttccctgataaatccgcgttctttgcttttgatggcgaattgagcgttgttgcttctcgaactcagcgcgcttgtcttgttgaacagcttggtatcgtttccttcggacattccggaggcatggtcgatgagcatgtgggcaaagatttccgtagcttcaaaagcataatctacctggctgtggaattgtttgatgatcagagcttttgcggataaataaaatcgaagagcctcttccctgcctgggaggctgctattcttgttcgttagcgcaaggaaagggatactgttcgtgaaaaactcttttgcgtggtgatctacgctagtgtaggtagcaagccattcgacattttcgtaatcgttgaggtcgatgaacggggccttggcaatcaggtagcacaggaaaagcccctccgtcaattcctgaggggtgacgtcttttttccggtagcggttggcttctttcaatattttatccgccccctggtagaacggaatgatctggccactgtccagcagtttcttgagccgcaggagttccgggttttgcttgttcagattcctgatggcggaaggaagggggagctgatcctgctccggagaggctgcacagggaaaagacagtgagtaaaggacgaataacagaaggagtggataagatttattcatgatgctgcaatcaggaggttatggattggcggtagagtcggcatgcagggcattgcctgctgtgttgcgcgtgacggtgcatccgaatttggtgatgcttaccttgatatttttcaagcccctggtgggggagtctttattggtttccctttcatcttcgtactcaaaactgaaatcctgggaatacgtgtcattgccaaccttgcagcagtccttgccgtcggcgtgtacgtaccacccgcaggtccatgaaaaggaatcgggaagtttcatgtcctgcaagtgctgcaagcgaatatccttctccttgtcccatctccagccgatgttgtcatgatggtaggcattcagggcattgggccacatcaactgttttcccggggtatgtaccggtttgaatccttccgggtcttctgcccgttccatgatgggaacattgctgaaactgaccgccaagggaagaaaagtcacgacaagcttggaggaagctcccggtctgtctttctccttgtcccggggatgtttttccacccgtttcccggaatgttccgctttaatgtcagagggaacgagaatgctgaaaacggagggttctctttccggcagttcttcatcaaggctggttttgactcgaaccttcaggttagtatcctgggtaagatttctgctgatggtcagcgtagcttgattaatatcgtcatttgatttctcaatgctggccgcattctccggctccagggaccattcaagggaatccgggtctacgtccctaactctcttgccgttcagggccaaggtgaccacttctccaataccgactttggtacgtttcctgtcctcgtcctggtctccctggtcgatgaggcattggggagagacggctttcgtttccgattcgatgtacagggagcggtcatccgtggcgggaatatcttccgcatgcgcaagcgctgccagggcgtgcagaaaaatgccggtagaagaaaggcggaaagaggggaaattcatgccagggtgcgagctgaggagagttatgctcatgatagtcttccgccccttttaatgtcaatgcatccaaaaatatgttagatacagtttgccgggggaagaaacgggcggttttccggatgtttaccgtcctaggagggggctaatgctccagctcccgtatgatgcatttcgccagctcccggggggaggcggagggggcagccggaagttcccggagccattgctcccgtttcaaccaggtacgctggcgtttggcgtattgccgggtggcgagcgccagtttcgcctggcaggtttcacgggtgatttccccgcgcagcaggctgcgtatcaacgccaggccaagggtgcgttccgccgtggcggagcaggggcccagggcggctgcttcttccacggccccctcctgcatcatgcgtgcggcgcggagggcgattctcccgtccagttccggaacttccctggtgatgacccagccgggccccaggggcggcttcagccagttccgcttccagaaggaaaggggttttcctccggcaaggacgatttccaggttgcgttccacataccgccggttggaagagttggtcagggctgcgccttccgggtccagggacgccagcctggcgtacaattcttccgtggaacagtccgcaaaagtggcgcggagggcggcatcccccggcggcgcttccgacatgccgtgggagaggaatttgaagtacaatccggagccgccggtgacgatggccgtttttccgcgggcatggatatccttcacgcaccgcatggcgcggtggtagtgttccgtggcgtcccagggcatccgggccggaatgatggataccatgtggtggggaacgcgtgcccggtcttccggagagggagccgccgttagaatgggaagctcacggtacacctggtaggcgtccgaaccgacgatttccgcacccagcatttccgccagttccacggccacggcggattttcccgacccggtgggtccggcaaggaacagagtagcgggaaggcctgtagtagaaatgccgggcatggcgcagtcaggatttttccggatgcctgaggcgttcgggcagcggcttgttttctgcgggattgccgatggcgagacagccggaaggcacatccctggtgacgacggctccggcggctaccacggctccggaaccgatggtgacgcctttcaggataatggccctggctccgatgaaacagccttctccgatgtgaatgggcttgccgtgcccgggatttccccacgtgctgccccagctggcgccgctccggggatagtgcatgtcgttgtccagaatcagcgtgtctgcgcctatcagtgtatggcgcccgatgtggatgccgttgacgcaaaccagggtggctccgctgatgccgcagccgtcctccacggtgatacgggcttcattggaaagggccgccaggcaggcatggtgggaaaggaccggattcatccgcgtcatggagtggatggtgacgccgttgccgatggtgatgcaagctcccggaaattttttaatccggggcagtccggacaggatgacgcccgttccggtacgcactccccggagcttgagcagcaggcagcctatctttgaaaggaactgaataatgagcttttttatcatgggaagaaaggcgaaaacaggttttctttggaagctccggaggtaaaagaaaaacctgcctgtcaggaagccgtgtctttttttctctttcatctccagcagcgagccatagacgtccataaagtcttgggaagtagtttgaatactgagcttcctttttatttcctctattccgtattttcccatggcaatggatttatccagggattccgtcacggcaaggacggcttggcgaatggcttcgctgtctttgactgggaggatgtatcccgatttgccgtcttcgacgtattgtttgcttccggcattgaccgtagtgataaccggtaattccatacagcgggcttccttgacaatggtgggtcctgtatcggccagagttggaagtaacaagcaccaggccgtttccatctgctgcctgagttgcatcctggatagttccccaagccaatggatattgggagggcatccggaatttagcttggtgcgtagtttcccgtttcctgcaatataaaggtctatatgcgccagggagggatctttaaaggcttcaatcagaaagggaagacctttacgttcgttcagtgatcctgcgaacaggcaggatggccgtgtactgggagcgcgtttcttttcctggaactcggactcaatgccgtagtcgataagatggatggaggctgccgggttgagtttccggacacattccgcagcccatggtgattcacatgtaatatgctggtatgccggagttgttcgtttttcccagaatgcttgaaggtgcgccagaaagggcattttactttcccggcaataggcatgcagggccccctggtatgataataatcgggaatacggctggttcatgcatgccttggcatatggaaattcaatgccccatgcatggaccagggctggtttcagggaatggagaagaaggcgtattcttttagaggcaagaaaatgcccgcttaaaagtcccagagccaaacttggatcaggcagaatgtgaatggtctggcctttcagttgccggacggtatgggcctttacatattttttgagagtaatccaatgaatttcatagcgtttttgatgagccagatcgcagaaaaaagcataaatccatggaatcaaggtgtggtcttgatcttgaaactcttcaggaagcaagcgtcccaaaggcatgtttgccaaaatggcgataacaggaagagatgaccgattttccatataaaaacagcaaggactattaataacgcggacgaattgaaaagtccagaaaatgcgcaagtatgatgatgagcgccttggctgcgagcaagatgaaaaaaagattgtgtctgttttctatctggaatcccttttttaaactgatacaatgatggtctttctttaaaacgggagacttggtctccgcaatctcctattgaaaaattttaacgcgaaaattctcataactgagaaacttggctggtccggaaaatgcaatgatgaaaatggcgagaaggcgttttaccgtgggataacgttcgtgaggaaaatagccggggccgaattcatcccatggaatcaactcagtccttctgctttggggtacgggaggaggcaatggagctgagcaggtcttcccattgttgatatacgactgatgggtcatactgttcctgccattgccgcagcccctcgtgccctcggcgctcccggaatttttcgtccgtcagagtccccacggttttttccaatgtggcggaggatgtttttttcaggatgatgcctcccttcagggtggaaacggctcccacatcgggagcaaaccatggggtgccgcacgacatggcctccagaatgcaaagcggctgctgctcctgataggagtaaaggaaaacggcggcgctctccataatggcggcttccacctccggacggggaagattgtaaagaatcctgaatctgggatcgtccccaatagcctgctccatttgctcagcgtaggaattgcgttgcggaacaaggaaaaggaaaacgatgttgtccagcttggtttgctttacatggcgaataaacagaagctgccgcttcgtgttgcaggcgctggcggggcacgtgaaaacgggagcgtgggacaatccgtatttttcccggaagaaaggaacggcttgtttcagcgccggaaacgtgttgggaatgcagacgtaacgggaaagattcagtttggagcagtagtaataatcgaaccctttgaagggcgttccataggagtcaaggaaaacaaggcggtttaacggggattcccggtgtacgttcagaatgcccctgcgtatttggaaaaaggaggagagccattttttcatgccgaaaaaaggagggtagtccacgcggaaataggaacggaggttggtgggcatgccgtgggaacgcagaaaaaagggaaggcgcttttcccgtgcgcatgccagcaattccttccggcaccagcccgaccaggaatggtaaacgataaaatccggctggatatcttttaaaaaagcgtccaggtactccttcaagcgtttggtgtcgtccgtcagggaatccggcagggccgtgatggggcagcatcttgtgcgggaaggatcctccggcaaatcctgctggcgggtgaggacgtgaatgtcccagcctctggagcccaggctgtgcgccatttcataggccgccatactcacgcctccttccccgggagggaaggcataggcggcaatcagaatccttcctttgctcacgggcggtaatatagatggaagagggaaataaaacaagaatgctttatggaacaatgttggataactggtatggatcaggttgtggcttatggataaaaagatgttgatgcagtggaatgttgtgctagattaatgccgcttttcatggccgtatgactggcagaatatcctgtttgtattttaccagccggataaatgaaaccgggtatgaatgatttctgtattttttgttttctcgtgaagagaggataagtccatggaataaatggtatgaaggagtctcgcgtaaaaaaaagcctgttgaatgcccgggtgaacctcattttttatgttctgattctcatcatttcatttttttcaagaaaagttttcctgaattgcctgggcgctgatttcgtcggtttgacgggaactttaatgaatctgctgaattttcttaatttggcggagcttggcataagcacggctatcggatatgtgctttataaacctatttttgaacatgatgaggccagaattaatgaaattatttctgttctgggttacatgtaccggtggatagggcgcatcattattgccgccggattgctgctttcctgttttctgccgctgatcttcccttcaacgggattttcctatggaatcatctattttgcttattattcttttctcgcctcttccctgattgggtacttcgccaactacaggcagactctcctgggggcggaccagaggaattacgtggtggccttctatttccagacggcctccataatcaaaattttatgccagatattatctgcgtggtatacgggcagctattatctatggataatgatagaactgctgttcggcattatttattccttcatccttaactggaaaattaatcaggtatatccctggttgaaaagcaatgtggctctgggaaaggaactgttcaggaaataccctgaggttattaaatataccaggcagctctttgtacatcggctgggttattttttccagttccaggtcacgccgtttctggtttatgcatttgtttccctgcagatggtcgcctactatggcaactattccaccatcatggataaactgttcctcctggtcaacaacctgctgggcagcacggaagccagcgtgggaaatctgatcgcggaggggaatgcggaaaaaatccgcaaggtattcaatgaattattttccctgcgcatgctgatagccgggacaatctgctttaccctttaccagcttctggagccattcatcacgctttggctgggagcgggctacatcctcccccgggaaatcatgatcctgatcatcatcaacctgttcatcactgtcacgcggggtgcagtggatcaatttttatacggctacggcctgttctgggatgtctgggcgcccattgtagaaagcgtgatcaacatttccgtagcaattatcggaggttacctatggggattgcccggcattcttctggggggtatttccagcctggtgcttattgttggcatttggaaacccttcatgctgtacacttggggattcagaaagaacgtgatgaattactggctccaattcggttaccagctggcgctgattctgatacctatggtgctgatgaactggatttggaaatattcccccttgcaaccctccgggtctttcctgaactggtttgcctgcgccttcctgatggttgtttcctatggcgtcataacgattcttttaatgtattgctgtacgaaaggcatgcgtggcatggtacatcgtggactggcaatagcggggacgcggctgctctggaagaggaaaaagtaagcgttccctatggggcattataatgattttttacttccttggcaggaaaaataagtgcaactcttttttattcatatattcagggtaactggttgatttccacgacagcggtctgggcatagtggtggccgacaaaaacccacacttgccggggttgcccggtcgtgttgggggcaagcgtcagggtgatttggccgccgctggctggtatctgctccgcggattggctgcaccatacggcggcggggtcatgcccgcacatcgtgtcgttaatggcgtacacagcctccgccagcgtggaggataccgtcagcgttacttcaccgccttccgctcccacctccagcgcggaagccgtcacctccggcacgggcttgatcgccactccgtccatgaccaccttccccaggatatccctggccgccgtgctgccgggcaggctgcccgtgttcacccgcattccggccattctcaaccctgtctcctgcgcgctggccacttcatgggctttgactgttgctgacaatacagccgtatggccgccgccgcagaaccgcgctgtcatgggcatgacgtattgcccgtcgacgaacaactcccacctgttttcaacgtagggatggtctgccgcatgccggggcgccattgctacggcaagataggtggcgtttgggaccagcgcccacacataccgggcttccccgttgccgcgcccgtaatccgtgccgcgaatcaagcaggatgcagaactgcccaggtaagacttgccgtataaagtcgcctgccaggcgggcgtcatatcataaccgttgtaattattaacggaattgagcagaggaaacctgtaatcctgccctgtcccggcatggtcataattgcaccagtgaatgggatgcgcatagcatggcgaggacgggtttgtggtgcatccatagccatgtgtggtgcttcccagcatgatggacgccttgtccgcccccgtaatgcaccatgccgccgccgccgcaaaactggaatctttgtaggttcccagtgaatgagcaaatttccagggcttggtgcccacccccagcaaggaaatgccggaggcgggagtcattctaatgacatggtcatatagttcattttcaatgatgccttccttgacggatgcattggcgctggaatacttgtaaatgctgagggattgcatgcgcgccagcaatgccacccatgacggaacggcggcataggaggcgctgcgcaccaggagccattcccgtctggcctgctcttcgagcatggagtcccaggacagggcctcctgggccgtggcaggcagcggcacgcgaacgcctccgttggcgttgacggtgccggcaaaggttccggactccgccatcatattttttaaaatggcatcctctccgggttgaacgccgtcctggacaaacaatctcgggacgggcgttttaaaaatctgtatgacaaaagcgttttcatcggatatttctaccgcatccgtcggagccacaaaaccgtattggcccgcttttcctgcttccagaacaagcatgagatccacgctggaacttaaaacggcatgtactgtacaagcttttgtacaagtcattacataggaacttcctttgatagtgtcaactttcatgaataaactaatttttaaaatactccctacttgccgatacggtcatcaggtataaaacgttgacgcattcttgcacacgctttgctggcctgctttgaatgcgtgtactgccagaactggttggcggaaatagtcaccgtggaacccggtcgtggaaaactaatggaggcatccgtaaaatgatctttttggacaagccggaaaatcactataccggaatctgggcgtgaaaagggcttccatgaaaaaccctttgtacgcaaagctaaaaatcaaaaggaaaaaatgggcttattctgctttcgtaataacgtttatgtgcgggaaagacaggcaaattctgaagctgtggcttcggatcatcatcagccgcggaatgaaaaagacatgagcttcgtgcatttgaagcatttgcagccatggaaatcccgagtggacaatttcctgactcggggaaataccaaggaaaaaaggaatacggatggtatcccgaaaaaaaatggctgatattggcgttccttaataaaaaagcgctctgtaaatcggttgcttcctggtcatcgggaaaggcaggaaaagctggcgcaatcctactggtgtttgccctgcaaaagccgtttgcccttccccaggaggcatctcattcgggaaacaaacattcgggcagaatcattttgctttcggaaatcccggatcttatctttccacggagattttttccaatacttgtagaacagcccgttatcctgacgcaggctattgggctgccagggcttgggatgcccccagtaatgaatgatgccgggactggtggcggcttccaacaaatccttcggctctaggggattattctcgaagctttttattccttcccagcggatcgaccaaatggcgccgtcgcagatgttccacatgggatggagcaagaaaatacgttcttgataacatgcgttcaaaatatcctgatcctgccaggagagatgatggatgttgcttttcgcataagataaaacttgggcttcaaaccgttcttcacgaattttcttaacatgataaagaacaacgcctgcattgatgtaaatggaatccctgcccagattcatttcccgtttccaacgtgagaaaaactcctcagtcaaatgttccgtagtgaaaacgccggcgatgaggcaatccccgaactcggtttcatacatggaactgatatcccggttgaaaatggtatcaatatctacatacagggcgcgttccaccgtggcgggaagttcccctgcgaggccaagacggtaatacgtcgctgccgaccacttggaaccaacgggaaaatccttgtatttatccttcatgtcaatgaagtgtaaactcaggcggtaagaccgttgcagagaatttaaacgagccgtattatcctcgttcaaaccgtctgtcatgatgtaaatatcggcatgaacgtcggctggtaaattctccatgagggaaacgatgcttacccccgttcccagcgctcccttatcgtctgtagcgtatacgatgttcatggtaaaggtccggcatggactatggcaggtgaagaaatggagctgcgtttcccatccgcgttactggtttctattgagaaacaacatggatcttcccattctttccaggcggtccagccagacgcataaggaaacggttctattcatgagcgcagtaaatgattgttccattccttcctttgcaaaacatgccttcgcataggcgtcaaaataggtccggttcaggtagggatgcgtcaccttcctgattctgcccagcaaggaggtcctttcctcttcgtcaagagccagcaacctgttggaatgcaattccctgatgatcaggaaatgaacggcgaactgccatgtgggttttttcatggcttcaagttcattcagcaagggcgcaaggagcgtatgaatggagacatgccggtaattcacatcatgcatggcggatgatgccctttgccggtaaattgaggtgacggttcctcccagcccgatcagggctgtctgcctcatgcaccgcgtccagtacaggccgtcttctccataggacatattttcctcccaggacggaagttgaaatgcaagagatgaactcaggataacattgcttgggtgcatgaatagcaatccccttaaccccaatttccgaatgaatacaggatgggatgggggacgtggcgctatgttggccaactcgtccaggatgtgacggttggaataaaccaatatctcaggatgaagattgaaaaaattagccgccagcgccaaatgttctgggtaccagtaatcgtccccgtccagaaaagcgatataaaggccttgggctttcttcattcctgcatttcgtgctcgcgaaacgccgccgttgcgctgggaaataagatgaattctttggtcgtgaaaagattggatgatagaaacggttccgtctgtagaaccatcgtcaacgataataatttcaaaatcctgaaatatttgagccagtaccgactgaatggtagcagcaatatatttttccaggttataggctggaataataacgctgaaaaatggcttctgcatttaggaaggagatggaacgcttttggagctggacgggaatccggatgtggaggaaagacttcgcgctgattctggagtaataacaatcggtaaatggaggagggaaaaaatccctcgtgacgccttcattgttaatcaacgcattgatggaccaaatcatagcggattaagaatccgtgattaatcaacgccgccataaaagatgcgcatgatagggaacatcaggatgataggagaatctttttaatccctgttatccccgtcatccttatattccccattacccctaacaaactttttcccagatttttccgttgacgccggattcttaatccggtacaaacgtgacgccttatctataagtactgtggatcatagtccatctcgggattcacatttccttttccgtgccgcttttcttcatgaatcctccggaactcccctccatcagcattattctgaccgggcataatgaggaatattgcattggagatgccatccggagcgtattcgggcaggattacgaggggccggtagaaatcatcctgtctgatgacggttcatccgacggtacctttgcagtcatgcaggaaatggcggcggagtaccggggaccgcaccgtgtggtattgaaccggaatgaaacccctctggggcgcgggccgcatatacggcaggccgtggagctggccacccatgaatggattctccgtcaggacggagatgactgttccttcccctggaggtgcaggatttttgccggagtggtgacggagcatccggatgccgtggctgtcgtcagccagatgacccgcgtgtatgaggaagccggcgttatgttcgaattcccggcgtttcctgctgttccggaagaggccccggtgatcaggcttcaagaggggactttctcctccactgcccattacggaggcagtatgatgatcaggaaaagcgcctgccaatgggggcgctccctgccgatgacggacaattttgaagatgacctgatgggatttcatgtgtggctgcaaggcagcatctatgaattgccggatgtctccctgtactattacaggtttgccgtcaaaaatatttgtgccgtcaacagtgcagcgcggtttgccagcatgaaaacggctgcggcctttgaaaaaagggatcggctgatgcggcgccagttgaagaaaagcaaggaagccggcctggaactgtgtaaggacttgttgaagggccgcactccggttttccgttcgcgggaagaattgcttgccgaaatggaggagagaagaaaggcgatacgctgcattgatcaacagcagaactggtggaactattccttccgccgaaggtgggcgctaaggaagccgggatggatgggcatcgtccattgcttgccgcaaaagctgtatctgctctgcatggtcttctttttcaagctcaggaaagtgaaaagagccgtttgcggagcgcggtagggggtgcctgaagaccccggatggaaagggcccgccagggcagggaaaagctcttggataaaacctccgtgaagtgttcatggaaccatgttctgcatggctgcttcctctgctgcatggggaatagcgtgtgcaggtttgagtgcgtggaatgggaaaaagggaatgaatgcgtattcatgcgcgaaaaagaagaaggggaaatcttgataccggtcatttggcagatagggacgcagggggatgaactgcatgcagggaagggcgatgcataatctttgtcgataggtgaaagcctccgggaagcgtcttttcaaaccgaagggattgatcggagggatgtagggaaaaaatgaaggaagtgccgtatttcatggaatcatccttctttggttatccggaaaaacaggaatcaggataggaaagcaaaaagcattttatgttttgttactaaaaatgagaactgatggcttaaccgcgaatttctaatccggattcaataaaaaatacttaatataaatggtgacagttgaggggaggcaatcctggaaagaaatgtccttcctgtcgtgcagcagcatgaagccgtataaaaaactcataatgtgcatgttggtaaaccttcatgtatccggacaaagaacccggattagaaatcctgtatttctccaccgagttttaaatctggaaaatggaagaaaagaacaggcatatccgggatagccgctatggttggatagaattcagcgtgattttaatcgtctataatctggagcattatttgagaaaaaccgttcaatccgtattggatcaggaatttaagaattttgaattgatcatcgttgatgacggctcgacggatggcacccttcaagtggtggaattttttcaggattccagaattaacgtcatttcccaggaaaatggaggcgcttcgcatgccagaaacacgggaatgaaagcggccaaaggaaaatacgtggcattccttgatggagatggctactggtatcctgatcatttgaagatggcatatgattttttccggaagcatcccggcgtgtacgtttatgccgccagatatacatggaacaaggaggattgcattccccgcaggaagggaaaaccgtgctccttcgtagtcaggaaactggggttaagagggcttttatccatccatacgagcagcgttgttctgaattcctccctggcatcttctcttcccttgtgggaagcaggcatgaaatacggagaggatgtcctgtactggatgcggttgatgagaagaacggcgatgattggcttgggaaaaaaagtgggctccatctatgtacagcgtgccggctctgccatgcaggagcaggcttgccgtgatatttccgtggaagacctgctgacgcgccggctggaggaatggaaactgatgccgcacagggaatggcagtttgccgtgcactttttaattttgcgggaattacatgtgcccagactgctgaagatggagaaagaagcccgtatccggttcctcaaagagattggttccatgctgcatggatggctggagggaccctgttttaatgcttatgtgcaggcctgctcgcgggaggagccggctgagatggaaaaggcgtttgacaagctccaggcccgggtaaactgctggtgcgtctgggcggacagggcggaaagatggtgcatgcgcccctggtccctcctggtaaatgggttgtataagggatttctatggggcaagtaaattccctttccgcaaggggcccggaaaacccggaaaaagggatggaggaaaaaaggcaagccgctcttccctgcgtcaaccggatttaccggtaacggcttctccgtagtaaaaagaaaaagcgccttcccacggatagtggaaaggcgcggtaaaaggaaagaaagcgtataccggattaatacacgtcccgctggtagcggcggtgctgtttcatgtccgctacgtactccgcagcttcttccggagtcttgtggccccaggtctggataacttcatgaagggcggcgtcaacgtccttggccatgcgggaggcgtctccgcagacgtagaagcatgcgccgttttccagccatttccagagctcttcgccttcctggaccatgagatgctgaacgtataccttcttctcctggtcacgggaccaggctacggacaatttcaatctgccgtccgccgtcaatttggccagctcgtcttcatagcagaaatcggtagctttgtatgggttgccgaagaacagccaattgccgcccttgtccccggaggcgatgcgttcctcccagaatgcccggaagggggcgatgccggtgccggggccaaccatgatgatgggggtatccccgtcttccggcaggcggaaattcttgttggtatgcacgaacaccctggccgtatgtcccggctggaggcggtccgccatgtaagtggagcacacgccgccgcgcttgcggtcccgggccgtgtagcgcaccgcgcccacgcacagatgcacttcttcagggtgggcgttcgggctggaggcgatggaataaaggcgcggcatgatctttttcaggatgcctgcaaaagcctccgcagattcaaaggaggccggatactccgttgccagatccagcacgtcgcgtccccacaggaaatcgctgagcgcgtccttgtccccggccagcagggtttccagctcctgactgccggaagcggttgcccatttggtcagcagggccttgttgacattggtgatgtcatagcagttgatcagggcgtcccgcaggctggcggctcccccctccggcgtgggaacctgggaatccgggctgaggccgagcttttcaatcagggcgtccaccagggaagaatcattggagggaatgacggccagggcgtctccggcaacgtacaccattccggcgccgtccaggctgtattcaatatggatcgtttctttcgggctgccttccccggtgaggtgcttgacggaaaggacgggtgcggggaacggattctttttgccgtacggttcggttgtcatgtgtaatgtaagtttctggaatggaataacggaaattaccagcggatggctgcagcgccccacgtgaggcctgcgccgaaggtgaccaggacgacgttgtcccccttgccgaacctgccggtgcggcgcgcttcgtcaaaggcgatggccacggcggcggcggaagtgttgccgtatttctcaatattgatgaacaccttgtcctccgggatggaaagacgctgggccacggcgttgatgatgcggaggttggcctggtggggaatgatcagcttgatgtcgtccgacgtcaggccggcgcgttcaatcacgctggcggcggaatccttcatgcggggaactgcctggcggaaggtctccttgccgcgcatggcgagggtagccaggcgttcgtgggcgttctccaccgtggtggggcagcgggagccgccgcccggaatctggagcaggtcatgcagggcgccgtccgtgccgatgtccgtagcgaggatggagccttccccttcctctcccgtggaagcctggagcacggcggctccggcgccgtccccgaacaggacgcaggtggtgcggtcctcccagttgacgacggtggaaagtttttccgcggcgatgatgagggccgtcttcatctggcccgtgccgaggaactggacggccgttttcatggcgaacaggaagccggagcaggcggcggaaatgtcaaaggcggcggcattcttggcgcccagggcgtcctggatatagcaggaggtggaaggagtgaacgtatccggcgtaatggtggagacgatgatcaggtcgatatcctccggctgcaatccgcaggattccagcgcccgctgggcggccttcgtccccatgtgggaggtgtactcgtcaggggcggcgatgcggcgttccacgatgcccgtgcgttcgatgatccattcgtgggaagtgtccaccatcttctccaggtccgcattggtcagacggcgttccggaacataggagcccgtaccgatgatcttgacgggcagtcttttaaaggcgatatcagaatttgcggccatagctttgggcgtatgatgaacagaaaacgtcctgacgttttatgtggggacagtctaaaagaaaggaggcctgatgaccagcacaaaacacgggactcctgccatgccgtaaacggatggcttacaacagccatccctgtcccttggcgggcggcgtggcccccatcttgagataggcggaaggcatcgccacgcgtcccctgggggtacggttgatgtacccctgcatgatcaggaaaggctcgtgcacgtcctccagtgtggacgcgtcttcccctacggccacagccagggaggaaagtcccacgggaccgccgttaaacttgtaaatcatggcttccagcaggcgcttgtccatctcgtccaggccgtcgtcgtcaatctcgatcatggtcagggcatcgtgcgccagttgctccgtaatcacgccgtcgccgcgtacctgggcgtaatcccgcacccagcgcagcagggaattggccacgcggggagtgccgcgggagcgcagggcgatctgaagcgcgcctgacggttccacgggaacgttcagcaatccggcggatcgctcgatgatcgcgcacaaatcctcctgcgtgtaataatccagccggttcacgaggccgaagcgggaacgcaacgggctggtcagcatcccggcgcgggtggtggcccccaccagggtgaacttgggaagattcagctggatggagcgggcgttcgggccctggtcgataataatatccagccggaaatcctccatggccgggtacaggtactcctcaatggccggatgcaggcggtggatctcgtcaataaacaggatgtcccctttttccagattggtcagcacgcctgccaggtcccccgccttctcgatctgggggccggacgtcgtatggatgcggcagccgacggcattcgcgataatattggcaagcgtcgtcttccccaggccaggggggccgctcagcagaatgtggtccagcacgtcgtcgcgctgtttggcggcttccaccatcagcatcaggcggtccttgatcttctcctgcccgcggaactcgctgaaggcaggcggtcggagggacaaatcaaaggcggaggggggtgtctccgtagtgcgtgtgtaaaaggactctcccatgcgcaggactagcaaacctgtctttgaggcatccgtcaagatggaagtgcaggcgggaagcgccttttccgggacatgccgtaagcctctggtcttttttgattgcggatggaatacggttccgtcagaatcgtgcgcaatgaaatggcgtatcctacctcttctgctggtgatgagcggcagcgtttttgccgctggcggcgtggaatcccgtccctatcacatcatcccggaacccgtcgaagtcagtacttcctccggagtctgtaaatcccccaaaatcctcaagcaggccgccaataaggccctggggccggagggatacaagctcaccatcaagccgcagggcgtggaaatccaggctggcgatcgcgcgggcctcttttatgccaaaaacacgctggaacagctccaggcccaatacagggacggcggcataccctgcggcgtcattgaagacaagccccggtttggatggcgcagcatgatgatggacaccgcacgccacttcgtgccggtggaggacgtcaaaaaattcattgatgtgatgtccttctacaaattcaacaaactccatttccacctcacggatgatcagggctggcgccttccggtgcccggataccccaagctggaaagcgtggcctccaggcgtaaggaaacctttggcaacaaaaccccccatggcggcatgtacaccaaggaacagctcaaggacctggtgaaatacgccgccgcccggaacattgaaatcatcccggaaatagacgtgcccggccacaaccaggccctttgcaccgcctatccggaattcctctgtttcccgaaccccaagctggaagtgcgcacgaatgcgggcatctcctacacgctggtatgccccggcaacccggacgtctggaaattctacaacgccgtcttcaatgaactcaaggacatcttcccgtcccaatacgtgcatctgggcggagacgaagcgccggaagacaactggatgaaatgccccaaatgcgcggacttccgtgagaaagccggtatccgtgaggaaaacaaaaaggccgccgcgcaaaaggaaatggtggaattcttcactaggtgcgccaaaatgctgaaaagtcgcgggaaaacggctgttttctggtacgagcccatgggcaaatacccggatggcgtgatcgtcactacgtggagaggcggccacacgcctaaaacggtagccaacaccacgggcgacaaggtggacgttatctgcgcccccaacggcaaatgctactttgactatccccagcttcccggcgactggccctccggccagccggacacgggctggatgcccgtcaacacgctggaaaacgtgtactccctggaaccgggacacggcctctccgccaaggaaatggaacgtgtgcgcggcgtagactgctgcctgtgggcggaacgcctgccgaacattgaacgcgtcttctaccaggcttacccgcgcgccctcgctctggtggaaaccgcatggtcccccaaggaggtgaaaaacctgaaccgcttcaaggacaaactgaattcccacaaaaaattcatgcaggaaaaatggggcatcagcctcgaacgcccggaaaagaaataaggaccggacagcaagagtcccttcctgaaagacgcaaacgctgaaaaataggagaacgtcttttgcctttctaaaagaagagaggcatcgggcacgaagaactcaaccttgttcaatgacaggcttctgtagataacagaagcctgttttttatatggtatgcattggttctctcttaccatcccattttcaggcttccctggatacctatgcgccttccatccttttcaggcaatggaccgaaacgtgagaagagcctagaaaaacaggaaaacgcctcccaagtgaaaaaaagattgccaagcctctcttctgccgttacattacccccgctttcctatctaagacaatctatcaacgggcaggtgtcagagtggtcgaatgagcacgcctggaaagtgtgtgtactggcaacagtaccgagggttcgaatccctccctgtccgccatcaattttttgccgcaatatatcattatgaacatattgcggttttcttatgtaggaggatggggaagaaatggggaaattgaaaccagatactggacaagtcatttacgattcgctatgctatgcaaatcgaccatacttcaatgatttcttccgcatcgtctcacagcaaccaagaaattctaccttttttgaaatgggccgggggcaaaaggtggctgacacattcacataaaaatatttttcctccatctgatagttataataagtatattgaaccatttttaggaagcggttctattttttttatttaaaacctcaaaaatctattctcgcggatattaattctgatctcattgaaacttttaatgtagtaaaagataatcccttagaaattgaaagtatattactttatcatgataaacatcattcaaaagattattactaccatattagaaataaaaaattcagaaatccaataaaaaaagcggctagattcatttatttgaatagaacttgctggaatgggctttatagagtcaataagaaaggtgattttaatgttcctatagggacaaaaacgagagtactgttaaatacagataattttgttttagtgtcaaaaatattaaaaaatgcagatattgtagaacaggattattacgaaactatttcaaaggcgaaaaaaaatgattttgtcttcattgatcctccatatacagtaaaacataactccaatgcttttataaaatataatgaaaatttattttcatggaaggatcaaaaaaattaaaatatattgttgaaaaatctcttaataaagggtgcaaaatacttatcacaaatgcccatcataagtcgcttatagatctctataaaggattgggagaaatgatttgtctttcaagatcaagtgtactagcttcagattctaaaaaaagaggcgtatatgaagaattagttattaaatgtggttattaaatgttatgaatcataatctttcaaaatcttttttattatgttctatcacctggatattatgctctttaccttcatttattactatgtcattaatttggtacaatgacattttattgaaatctccaaatataagtgggatagaaggaaacgaattattgttatatataatttctttttcttcgtttatgattcctttgtatttttcttattttaatccaattattgaaaagagaagaaagctacaaatatgtattggagtaccagcacttattatttttatattttcgacagtattattttgcctattaaaactaaaaacatctgacgctagtgtagaaaaacaatatgtcgtttttaatttaataataattttatatatactggtcatagtattgtggctattccatactcatgcttcttctccacctgatacggaatctatagaaaaaaagaataataaagacttacttagattagataagcgtttaactttaagattgaataaacagaagtctcgttatgaataatataacaataaatgtattacaagtaaaacaacctataggtactttttatattgcatcaatcccttgttatacagttgctcaaatggcaacagcggatgtacgacgtatggaagacagagatatggagaagtatttaggtattcaacgtccgttaaaagacgaacgcgttaaacaattgcaacgatatgttaagactgtagatgcaacatttcctactggtgtaattttagccattgacgaaaaatgtgcatctttagatgaagatagtggagaactgactatatccgaatttattgataacgacaatcctacgaataatataacttttgataaaatagcaaaggttatagatggtcaacataggatagctagctttgttgagtttgatgaaaatggtcaaaaaacatttacttttgataaatcagtagaatttgatataaacgtctgtatttttattggagcagatatatcgcaacaggcaactattttttctactgttaatctagcccaaacaaaagtaaaccgaagcttggcatatgatctagctgattttgctagttttagaagtccacaaaaaacatgccatatgatagcagtaatgcttgatgctcgagaagacagtccattgtacaaacgtattaagagattaggagtaaaaacagttggtcgtgatactgttgagccattgacccaggctgtatttgttgagtcattaatgagatttatatcttccgatcctatgaaagatagagatgatttacaacgaggcaaaaaattatctattccaaacgaaattgactctcgaaaactaccttttagaaatttatttgtagaagatagagatgaggatatagctttcatgatttatgaatattttcatgcgataaaaaataaatggccaaaatcatgggacgatttgaatacaaaagggaatattttgcctagaagtaatgcttttaaagcatttatgaaattcctacactatatttttcaaaatataacggggcaggtcttagatagaaacgattttaaaagttattttgtaaagtcatccttagttgatgggaatataacttctgaacaatttcttccaggaagtggaggagaatctttattttataaaaaattattggaaggagctccaagttaagtaagcgttgtttatgctgaaactttaataaaactttattaaggtactattatatgaaaacaccagcaaaaatattcatatcctattgccataaagatagagcttttttagctggcctttcgagtcatatgattggcttgataagatctggattgattgctaaatggacggattataagatcaaaccaggagaccatttggatggttcaattcaagaggcactaaataattctgatattgtattattattagtatcagtagactttttgaattcagaatactgtatcgctaaagaatttcaagaagctcgaaataagcagttaaaatgtgattgtccgaggattattccaataatagtaagatcatgtgattggttatctattgaagagctgaaagatcttaaagcattaccgattgatgggaaacctattaaaagttatacagatcccgataaggcatatcttgaaattattcatggcattcgtaatattatagatgagaatgaaaaaaattcctgtggaaataatgaaataatgattcaaataccgcagcattttgaatcagcttttattttatacaatatattggacgagtgcgtagaggaatttaatagaggaatatgctttcataaatatagatatgaagatattttatatttttcagcagatggtgttaaaaatagatgggactatagaacatatcatccatatagaatccctaatttatatcaattccttcgaatcaaaaaagagctcgttaaattaaattggcttattgacgaaaaaatcatttcaaatggagactctaaagaataccattatacgcttaatcctgatattgatatgaaaaacgcactggatcaaattaaaagtatatataaattctgcgaaagtgatagacattacaattttaattaatatgtatgtttgattttatctacatattttttatatattttattaatagtcatcccatatatgctggacaattttcataggaatcattttaaaattaattgtatccagtgattttcccatagaaattgttctagggaattcttcataatttatttgtaaattttattccttatttttactttcttagaaattcatatccaaggatagtataggactagtatttttataaatgtaatgcttcataaccagaatattttattctgaatatccagaatcatttgtaaagattccagtgggaatggctagaattaacctacataaatctgaaaagttaccggcaaaatgaacttttcgctttttctgtttcagtcatttccctataaggaaataattatcattttttaccaagacctatagtatacctagtattggttaagaataatccgaattttatcatagcctctcctactcgcttattcctgcaatgtcagttttaggttttgggtaggctttatcggcaatccattttttcgtttctgctaccatttcgggggtgacggtgaaatcgtaattagcataatcgccgatatggaattgtccggttttgaagaagccccatttctcgaagaaatcggtcagatcggttttcgtgacgtcacagcatgccctgatgaattcgaactggtatttgatcgttttatttccgccgtagtttcccgcgttgttacgcagatattccatgacgtcagggtagaagtcgggatgtccgttttcggtaaagtagagatggagctgccacagggggaccagcttgttgaaaacgtcctttgattgcaggtaggcaattttcccatcgatgatttccttgcgcgccttgtcgtagctgtcctggcgtttcaagcggctttcattgcccgttttggcggcggcttgaagagagaagatgttgttgctgacttccgtcatgccgccccaggtcatcgggcgcatttgcatcacgtggccgacttcgtgggagaagccccaacaggcgtcgcctttgaggacgttttcaggatcggtcaccattcgcatcgtaccattgtctcccaggtaggctactccatcaccgtcgcggaacatgtagtagttgaagttcacgcgggcaaagacgcggtttttcgggattttgccgtatttctcaaggcccatcagctggtattggatgcctatcagcttgtcgtaggcgttgatgagttcagtgccgcggtccctggtgaattttttcaggaattcgacggggtaagcaacctggatgtattttccccgggcgtccatgatcggggagacggcctggtcaagcaggcgtacccagtcttcgttggtatcgccccgggtggtgtcgaaatagccgttgactttgcccgtcacgaaatggacggggattttcggcgccgtgtcggcatcattgctgaagtagctgatgtaagcgttggcgggcgtttctacatcaatgatgttgattccttccttgaggggaatttgctttttgtgcagtccccagccgttggggtctttcgtcggctgcactccttcggccggcttgcgcatcaggttcgggagaaggaggctgatttcacgcccatccgtcttgccgaccagcacgacgtgctgtcctttttccaggtagacgcccgtcatgttgtcgtatttgctgaatccctctccgattctgaggtttttgcccgtctggcgcggtgaggggatggcctggtattcggcatacaggtagtccggcttgtagttgcctgccaggattttgtccgcgagttccttcatcgcgtcagactggaaggcggaaatgtctttaacatcctgcttcaaagccgtgcaggaggcatccttgaatagctggaggtcgttgccgatgctttccggagtgttggccgcaaatacggatgcgagcgacaacaggggcagggtgaggaatgaagtgattcggttcatgataacgtgggagtgggtgattctacgatgttacaagttacattctccgttttcctcttctttcaccatttctctttttaccggcaaacgaaaaaatcaactcgcttcaacggaagacggggcggtttgatgaatgggaacgctctcacgttgtatagctggttttcttttcgtatggcgtgttttttaaggcttccatgttttactcaattgccttcccatactgcggtagtcctgatgagggcgtttgcgactgtaacccttgagccatttgattgagtccttctgaaattcttcgacatcggcatagaatttctaccacgcgcctccccgcaatattctcttcctgtcatccgtcagaatggcttttatgtgccatctgtgttgctgatagaagaacaacacgttgttgttcaggatgagggctgcctgatcgaggcgtttctccatgtagagaaagcggaggcaacggatccataggtttctatgagcatttacaggtagattctgcctgtgtttttgggtttgcccgtacagagagagtccggcacagccgggaaccttgctttccacagccattccttgaagcaaagtcgctcttttcggaaggatgggagctgttttgagttgcttgacttgagtgaactccttttccagtttcagaaaccatttcctgcggtttcccggatgcggggttccacttcgagagacattaaagttatagaaatgatcggcttctcaccctcctttaagagtcttattcttgaacggagaggcttcgatactgttttaacaggagagtagcctccaaccgtttttccaattccagcttctgatgaaagggtccttcatttttcaaatcaggttattgtttttgagggctaacaagcttctttgggtcaaggctacctattttgcgctgctggctattgttacggctattgcctccatttacctgggcgagtttgttccgtttgatatttttcaaaagatcggggccgatacggtcgatacgattttgaacatcctggcttcaagcatgctggcggttacgactttttccttaaccacggttgtttccgcttatgcggcggcgacgtcgagcgtaacgcccagggccacgaaactgctgatggaggattccacggcccagaatgctctttccacgttcatcggttccttcattttcagcctgattgcgattattttcctgaattccggcatgtatgaccagcggggaagggtggtgctatttgttgtcacgctgggggtgattgccattattctggtcacgcttatccggtggattgagcatttgtccaggcttggccgggtgggagagacttccgagctggtggagggagtaacggaaagggcattgctggaacgcgcccgggaaccctatctgggcgccaatcccctcgttgacagggagcttgatattccggaaaatgccgttcccgtcaggagtgatcagacaggcaatattcaatatattgatattgaaaagctggaccatctttccagggatagagatcttgatctttacgtcgtctcgctcccgggggatttcgtgtccgttacctcggttctggtttatgctgacaagcctgtgtcaaatgaaacccggcgtgatttgcttggagcgtttatcatcgggcatgagcgcaattttgaacaggaccccaggtttggattgtgcgtgcttgccgagattgctgccagggccctgtctgcggccgtcaatgattacggaacgggtattgatattattaaccggggcgtgcggctgctgacgaagtatgcccaggaagaacgccgtcccggcgtgaagcacgagaggatatgggtgcctccgttgaccgtctccaatttgttttcggatattttcagccctattctgcgcgacgaaggagggattatggcgattgacatcaagttgttgaaggcttttgctgcattgcatggcctggataacgggcagttcaaggaggaagcccgcaagtattcccgccaatgctatgaacatgcatccagaacggtagtgctggatgaagataaggaagtcctgaaaaaactggtcattgattagcttgcttgtcttcacggtgaagaagaggggttttagaggtccaggtatggttgaatgggctgaatcttattaacggtccacagtttcccggatggaccaggttgcaaaaaggcgctattttccgggagaatccatgggagagaaatcatcatggtaaaacggatggttgcctggaatttccatgttcatcaatggggcagctacggacgtcatgtccgttgagtaatattcaacattttcatgtaaagtgtttttgggcaggaggaagtttcattcattccccggttattttcttcagcatgttgaattttcgataggtaccggaccgtacatgaccatgtttcagcgtattgtcatgaaggtaagcacatgttttcgtaccggagttcttttttgcctgttgatggctggcagtccttatggtttggcggagaaacccgttttaacggactggaattacttgccgtcctacggacagtcgctttccgtaggatggacggccaagccggtggtgacgacggagcagaagaacggcaatttgatgttcaagggcggcgtccgcccttttgagggcggcaatgaccggagcgccgtgattcccctggtagaaggcgtttcacctgacggcgccaggggagagacgcccgtttccggcgctgccgggaatttcatgcgcctgctgaagaagcgcgcctccggtaaggcgtccaacgtccggttcctgtgctctgccgacggtgtgggaggtgtcagcatcggtgttctttccaaaggcaacgccccctatcagcgtattctggatgatttgacagcggggcgcgagctcgcctccaaggccggcaagtcattttccatgccttgtttcctgtggacgcagggggaaaccgaccagcaggacaggaaaaccggggaatggtacaaggagaagatgcgcgcgctgattcaggatattgacgcggacgccaaggccgttaccggacagaagaacgatgtgctctgctttggataccaggttgcctcccatctcaattattttgcccagaatcccacggattatcccgcgattgccgtggcccagctggatttggttctggaaaaggacagccggtacatcatgactacgcccatgtaccatttttcctatagcgatggggtgcatttgaccgctcccatgtcccggctttacggggagtatgccggatacgtcatgtacaaggtgctggtggagggcgtgcattggaagcccatccatcccgtcgcccatgcagttggcaggaaggggcaggattggacggtagacgtgaagtttttcgtgcctgtgcctccgctggcgctggataccaagacgatccttgatccgggcaattacggcttttccctggtgaacgggctgggcgaacctctggagatcaagtccgtcacgctgaacggcagagacgccgtccgcatcataatgtcgtccgacccttccggctgtcatctccggtacggaatgaccttgaaggagaaacttccttccggcccgcgcaccggagcgcgcggatgcctgcgggattcccagggggagaaggtgaagacccggattcaggacgtcgtttaccgcatggacaattggtgtccgtttttcgactatcccctggattcccggaatgggatgaacaagacgaagtccaggtagattttcatgtgactgccagatttttttggtttctcactccttcagcatggtttatccattcctttggagagagtcagagtttctgctctggtcttaggatggtacggcatggattgcggttgtagagcccttcggaacaagataaagtccagtaatgatgaataccatgttcaagtttttgatgggtgcggtgtgcgccgcagttctgcctgccttcggacagggggagaagacggattttcccacggacaaggcggtgaccgtattcagcgccggggaagggaacccttatgcgtccatccgcattcccgccttgctcaatatcgggaaggggcagcttctggcgtttgccgaaggccggtataagaataccgatcagggggagaacgacattatcatgagcgtcagcaagaatggcggaaaaacctggtcacgcccccgggcgatcgccaagtcgcatggggccacctttaataatccgtgcccggtttatgatgccaagaccaggaccgtaaccgtcgtattccagcgttatcccgcaggagtcaaggaacggcagcccaatattccccagggttgggatgacgagaagtgcatccgcaatttcatgatccagagcaggaatggcggttcctcctggacgaagccggaggatatcacgaagacgaccaagcgccccaccggcgtggacatcatggcttccggcccgaatgcgggaacccagttgaagagcggctcccacaaggggcgcctggtgattccgatgaatgaagggccgttcggcaaatgggtgatttcctgcatttacagcgatgacggcggcaagaattggaagcagggccagccgaccgccaatatgaagggcctggtgaatgaaacgtccatcgcggagacggataacggaggcgtggtcatggtcgcgcgccactggggcggaggcaattgccgccgcatcgtgtggtcacaggacggcggtgagacatggggtgaagtggaagatgctccggaattgttttgcgacagcacgcagaattccctgatgacttattctctgacggaccagcctgcctttggcggcaagagccgcctcctgttttccggccccagtgccggacggcgcatcaaggggcaggtggcgatgagctatgacaacggcaaaacctggccggtgaaaaaactgttgggagaaggaggttttgcctattccagcctcgccatggtagaacccggtgtcgtgggtgtgctttatgaggagaatcaggcgaacatcaagaagttgaagttcgttcccgtgaccattgagtggttgactgacggaaaggatacgggcctgccttccggcaagaaacccccggtatccaagtagagttttattgggagggaggccatttcattctcccttctgcgcgctgttctggctggtccaagcttccttcatagtagctcaagttattggttaatgtccaaagccattccagccagcagaagtttctcctgaaatggtgcaaggacacccgtacggggttgaatctatggcatcattgatatctggccgacagggcggtcaggcagcagaagagggagaaaaagtggcgcaaaaccggttactattaaaaacctcttgcaacaatgaattgagggcatgcaaattttccgggtcccggcagaggaacaggattttttgctttggaatttccaggtatgacaaggtgcggatggtttgtctgcttgattccggggaggacgcagttaccctgcaaggcatccgttgcccttggagctcttcccattcgggagggccggcaaacggaagatgattccccgtttcaatatatgtcctggatttatctggtgttggccggtctctgtgagatcggatggcctctgggcttcaagctttcacaggcgcccggcacgggttccggcaggtttgccgcctgcattgcgttctccgtgttcagcatggccctgagcggttttcttctgtggctggcccagcgcagcattcccatcggcaccgcttatgcggtgtggacgggcatcggcgcgctgggaacgtttctggtgggcatcctgtggttcggggattcctccaatgtctggcgcatgctggcggccaccttcctgctgataggcattatcgggttgaagctggcccccgggcattgagcttccctgtagggcaattcatgccggggcgccggagaaggtcagcgtgcagcagccctccggaagggttcaacggtgggaaatatctttttcccacactgttccgcaggcgtcggaaggcatgcgccagtctcctcgcggagaaagggcaatggtgcctaccttggggccgtccggcatgcaactgcgcttgaattgctgccgaaagaagcggcggatgaagatgcccaggcagcggcggatgaagtccggctggaattcgccgcggaaggcgtgctccgccagatacaggattttgtccggctctgctccgtatttgatgaaatggaagaggaaaaagtcgtgcaggtcgtaaggccccagcacgtcttccgtacgctgttcaatggagccgtcgcctgacggaggcagaagctccgggctgacgggggtattgttgatgtccgcgagggtggaggccagttccggagacgattctccggcgatgtgttcaatgaggcaccgtatcagcgtcttcggaatggagcagttgaccgcgtacatggacatgtggtctccgttgtaggtgctccatcccagggcgatttccgacaggtctcccgttcccacgaccagccccccggttttattggccaggtccatcaggatttgcgtgcgttcgcgggcctggacgttttcataggtagtggtgcgttcggcggggtcgtgcccgatgtcgccgaagtgccggaggcagcattcggaaatggggatttcccgaagctccgcgcccagaaggcggcacatggttacggcattgtcatgggttctgtccgtggtgccgaagcccggcatcgtgacggccagaatgtcggaggcggggcgcttcaacgcccggcaggcgcgctcgcaaataagcagggccagcgtggagtccagaccgccggagatgccgatgacaagccgccgtgcatcggtgtgctccattcttttagccagtcccgctgtctggatggcgatgatttcttcgcaccgttccgggcggtgtacgggggagggcagaaatggccgcgccggattaaaggcgtattccagaccggggggggcgggaacttccgccggcagcgtcagatgaagggcatttccggcaggggaaagggatttgctgtcattgaaggagctttcggagaggcgcgccgccgccagccgttcaaagtccacgtccgcaaggatgagggagctttccctgccgaaccgttcgccttcagccgccagcctgccgttgtccgcaatgagggaatgcccgccgaatacggtgtccgtggtggattcatgcacgcctgcggaggaaaggacataggcgcagaggcacctgccgctctgctgcttgaccagttccctcctgtacgcggccttgcccgtgagttccgttcccgcggaggggttgaatatggccctggctccctgaagggccagtccggagctggggggaatgacgctccacaggtcttcgcatatttccacgccgaagctgaaggaggaggctgcatcctggaagatgatttccgttccgaacggaatatatgccccattgactttagcctccttcgtccctgttcccagctccctgccggaggtaaactgccgcttttcgtagaattcccggtagttggggagcacggttttggggatcagcgccagcactctgccggactggatgaccgccgccgtgttgtacagggcatcttcatgcaggaagggcaggcccgccacggcaatggtgcctgagccttccgtcgcttccgcaaagcggcgcaggccgtccagggccgcctcccgcaggcgcggctggaagaagaggtctccgcaggagtagcccgtgatgctcagctccggaaagacgacggcagcagctttctgttccgcagccttccggaatccgtccatgagctggtcgacgttgtaatccacatcagccacgcggagctgggggacggcggaggcaagtctgtaatatccgaacatgggcggcgcagtctggaaaatggagcccgcagatggtcgttttcccgtaatcaggacgcaatccgggagaagcgggcctgatccggatactaaaagctcgtgaaagacttgtaaagccatcagtggggactgcatcccgcccgtctgccgggaggatgaggaagcggcaggaaaaggtattccgcccggctgccttcaacgggccgggcggcgggagcggcccttatgcttttttcctgaaatcctgcggtgcggcggcttttcatgctccgggaacagcattgaagctggaaaaacgggagaaaaggagtaaaccatctcacaaagcccgatgaataatactgaccgatttaccggaaaagccggggcctacgttcagggcaggcccggttatcccgccgccgttgttgagcttctgacgcgggaaacccgccgggagaatccccgaatggcggatataggttccggaacaggcatcctgtcccgcgccatgctggagcatggctggaccgtgtacggcgtggagcctaacgatgacatgcggagggaggcggagaaggtgctgaagggtttccaccgctttcattccgtgctgggaacggcggagcataccctgcttcccggcgcttccgtggacctggtaacggcggcgcaggcgttccactggtttgacgccgccgcgttcaagcgggaatgccgccgtattctggccgcggagggcaggatagccctgatctggaattccagggtggaagacggccccattgtcctggaggaagggaacatccatcgtctttactgcccgcgtttttatggattcagcgggggcctggccgacttgacggatagaatcggcgagtttttcgaccaccgcttccgggtattccgctttcctaatgatctgtcctatacgcgggaccagtatctccgccgcatgatgtccgcctcctatgccctgacggaaaaggatgagggccattccccctggctggacgcccttaacgggctgtttgaccggtttgagacgggaggccgtgttacggttccgaatgaaaccgtggtgtatttgggggcctgctgaggacgcaccattcatgcactgcatccggaaaaggatgttcacgcgttcctttgtcggttgtttccttggcctccatccagtgcgatgttcttccggcagaagcccggaaccgcaatggcccttctgccggaatatcccggaaatgtccggcaatgaaaaaaggaaagctttctttcagttcatggattgaaagatgatggcggcaaggacggcgatgattgccagaacaacaatgatggtgggaatatagcgggttttgttcacgtcaagagtccactccctgttgaggcgggaaagatcctcccctgccgcgtagcgggagaaaaggtcatggagctgggagtaatccagggctttgggagccatgtaaagttccctgttcttcccgttgacgaacgagatttcgcaatggtagttttccggaccgttgcatgtggcctggaggaactcgtctccgcggctgcagatgatgaaggcctccgtatcgtttttgatgccggaaagggctttctcctgtgtttcgcagggatctccggagagctcccagacgatgggaggaagggatgaatgaaggctcataatagaaacggtagaggaagatttctcctgccgccagtataaaagaacttcctgcttcattcttgagaagagaacggacccttgcatgatgctccggagggtgacgagcgccctggcggggtacggcattcaacgattgtctttccgcgccaattccgggcctgaatgtttcttccgggcacgtgtcgtccggatttctacggccccgcattgatatttgcttttccgactccggaaaaatcatcccgggatgcagacatggcttcttctctcacgttattcttgctttatcccggcgggcctgccgtgctacgatggctcaccgccatgacgcagcagcctttttcccaagaaccttttatggtttccggattgcatggggaccagattctgggcgcccgcagcaatcagcaggattccttttccatcctggccggggatgacgccctggtgctggtcctggcggacggcatggggggctataccggaggggagctggccagccgcgcggctatagaaggtttttcccaggcgtttgagcgggaaaaccggtctcccggcaagaggatgaaagacgcagtgaccgccgccaatgaacaggtgcgtacggtccggaagaagagggggaaggatgacgagatgggcacgacgctggtagcggcctggatagggccggaagggctgcgctgggtcagcgtgggagattcccttctgctgctcatccgggaggaaaaaatgtttctgcttaatgacctgcaccagtattccgcggagctggaacgcatggcggatgaaggttccatcagccgggaggaggccttgagccatccttcccgccattccctgacctccgccctgatggggagggaagtgcctttggtggatctgcgggaagagtgcttccctctggttcccggggaccgccttctggtcgccagcgacggagtggggccttatctggactccctgggcccggcggggatgcggtacttgtccatgctgtccgcggaggaattggtgcggtccgtgctggaaggcatcaaccgtgacggcgcgcccaaccaggataacgccacgctgatctgtgcggaaatagcggaagcgtgattctccggaggcggtgtggctgaaaaggggccggaaacaggcgctggttgaatttcacatccctcctccggcccggacggataattaaatgccccgcatgcaggagacgcatgcggggcattccttttaaatggctggagccatccgcgttcaggaatgatattcctggagggagcggggggataccttcacatgctgggcggaacggatgccctccaccgtggctctggcggcggcgatggtggtcatgtacggaatcttcttctggatggactgcatgcggatgaaggagtcgtcaatcatgctggtgcggtccaccggagtattgatgatcaggtcaatctgcttgttggtgatcatgtcgcccaggttcgggcggccttcatgcagcttgttgaccacttccgtttccacgccctggccgcgcaggtattccgcggtgcctccggtggagacgatcttgaagcccagggagatgaggtcccgggcgatggattcaatgaacttcttgtcgcggtcggaaacggtgacgagcaccttgccggaggtgggcaggatgcagcctgcggcttcctgggccttgtagtaggccatgccgaagttgtccgcaatgcccatgacttcacccgtggcgcgcatttccggtcccaggacggggtccacttccgggaacatgttgaacgggaagacggcttccttcacgccgataaagcggcaggcgcgcggcttcagccccaggtccttgagcttcttgcccagcatgatttccgtggcgtggcgcgccatggaaatgcccgtcaccttggagacgatgggcaccgtacgggaggcgcggggattggcttcaatgatgtacacctcgtcatcgcagatggcgaactgcacgttcaggatgcccttcacctggaaatccttggcgatcttggcggcgtgttcctcaatggtacggacgtgcttgggggcgatcgtcacgggaggaatggcgcaggcggagtctccagaatggatgcccgccagttcaatgtgttccatgaccgtggctacaaaggtgtccgtgccgtcggccagcgcgtccacttccgcttcaatggcgttgtccaggaagcggtcgatcagcatggggtattccgggctgacctggatggcctccacgccgtagcgcttcaggttttcttcatcgtaaatgacttccatgcctcggccgcccagcacgaaggagggtcgcaccatgaccgggtagccgatccggcggcccagttccacggcttcctccagggaacgggcggtgccgctttccggctggcggatgttcagggcgatcatgcgttcgcggaaatattctcggtcttccgccaggcggatgccttccggctgggtgcccatgatcttcacgccggcatccttgagggcctgggcgatgttgagcggggtctggccgccgaactggacgatgacgccttccggcttttccttctcgtaaatagccagcacgtcttccacggtcacgggctcaaagtaaagcttgttggccgtgtcaaagtccgtggagaccgtttccgggttgcagttcaccatgatggattcatacccgttgtcgcgcagggtgaaggcggcatgcacgcaggtatagtcaaactcgatgccctggccgatgcggttgggaccgccgcccaggatcatgatcttcttcttgtcgttcacgggcacttcatccttcgcgccgctgtaggtggaatagtagtattccgcatgttccacgccgctgacgggcacgatgcggtaagtggccgtgatgccgttttcctggcggcgggtgcggacggccttttcagacacgtcaaaaatctgggccagatacttgtcggagaagcccatcttcttggcctggcgcagggtttccgcgggaagggaattccaggcctgcccgtccagggagaagtcaaagtccgcaagctccttcatttgttcaatgaagtagggagtgatgcgggtcagcttcacgatttcctccacggtcacgccgcggcgcaggagttcgtaaatctggaagaagcgttcgctgttgccgtacgtgatcttttcacgcagttccggcgtagtgagggcttccagcttcttcacgcggcccagcccggcacggccgatttccagggagcgcacggccttctggaaggcttccttgaagttctggccgatgctcatcacttcacccacggccttcatctgggtgcccagcttgtcggaggccttcgggaacttttcaaaggcccagcgggcgaatttgacgactacgtagtcgccgtaaggctcgtatttttccagggaacccttgcgccagtagggcagctcgtccatcgtgatgccggaggccagcttggtggatacggaggcgatggggaagccggtggccttggaggccagggcggaggagcgggacgtgcggggattgatttcaatgacgatgatgcggttgtcctcccggttgtgcgcgaactgcacgttcgtgccgcccgtgacgccaatggcgtctagaatgcggtaggagtagtcctgaagcctgtcctgcacgtcctgcggaacggtcagcatgggggccacgcagaagctgtccccggtgtgcacgcccatggggtccacgttttcaatgaagcagacggtgatcttctggcccttggcgtcgcgcacgacttccagttccagttcttcccaccccagcacgcattcctccaccagcacctggttgatcagggaggcggccaggccgcggggaaccacctggcgcagctcctccacgttgtacacgatgccgccgcccgtgccgcccatggtataggcggggcgcagcaccacggggtagcccagctcggcggccaccttttccgcttcctccacggaatagatgggttcggacttggccaccggcacgccgatcttgtccatggtctccttgaaaatgatgcggtcttcaccgcgggcgatggcttccaggtccacgccgatgacttccacgttgtactgcttcaggatgccttcctcattcagcttggaggccaggttcagggccgtctggccgccgaggttgggcagcagggcatccgggcgttccttttcaatcacggccgtgatgcggtccacggtcaggggctcaatgtaggtgtggtccgccatgccggggtccgtcatgatggtggcggggttggagttcaccagaacgacgtcgtagccttcagcgcgcagggccttgcaggcctgggtgccggagtagtcgaactcgcaggcctggccgatgatgatggggcctgagccgatgatgaggattttgcggatgtcttcgcgttttgccatggtatgatgcctctatgtggtccgtggtggttaaaaataaataccggaaacaaggtccgcccaaggtgcgttgcctctccgctccgcatacccggcgcgtgacctgacgcacagtaagggacgttctgcgataagtccagacaaaacaacaggaattccggggaaaaggctatggcctttttccctttccgtacagcgttgcgcgcgcaatccgcccttgatattttccgccgcccgtataccctgtgggacaaggatgaggaatgccctgatattgatttgctgcctcgggctgctgtggcccgcagccgtgacggcggcggaacgcgcccccgcgggccggggtgcggccatgactccgggtgaggccgcatggtaccagtccctgcgcgccggactttcccaattccggaagggaggaggctacaagaccaacaggcaggccatggaagccctggcggagaaaacctgccgctgggacccccgcacacgccgccccgtcttccttctccgggaggccaccccttccttctgctcctccgcctgctacctgctccttttaaaatccctgcaattatgggacgccgcccagccgcagcccgttatttccgagcgtgcgtggctggccctcattccccgcctgggccagcatgacggcgaagggccgtggggctgggcgaacgccaacggtcccggtctggccgtgctggtgcacaggctgggggccggcatcaactttgaagactggcggaaggcccgccccggagacttcatgaagatattctggacggaccacatcggccgccgggaatccggccatctcactgttctgctgaaggacggcggggacacggtcaccttctggtcctccaacatgccggacggctacggagccaagacggtgcccaaatcccaaatcaggcgcgtcatcttcacgcgcatcaccaggccggagcggttcaatctggctccggcggtaggaagccatccgtggctctcctccctgctccgtcaggaggtgggcatcaaggaggtgcgcagatactccggcatgcagaacccctgacctcctcccgccgtgaagaaatgctccttccctccctccgtcacgccggaatgctccgtgctggtgctcggctccctgccgggggatgaatccctgcggcaggcccagtattacgcccatccgcgcaacgccttctggaaaatcatgggaaccctgctggattttgacccctccttgccgtatggggaacgcctgtccctgctcaaccggggcggggtggggctgtgggacgtggtggcctccggcgtcaggcccggcagcctggaccagcacatctcccaggaacagcccaatgacattgccgccctgctggaatgtttccccggcatcggcaccgtctgctgcaacggcaccgcctcccataaatacctcaagcggtattttccggaactattcctccgggaaacccctgccatcatccagatgccctccaccagcccggcggcggcgcggctgacgtatgagcagaaattccgcgcctatgaggaagttcttctcccccgcctccggcagggaggggaaaaaggctgagctcccgcgccttacttgccgtctaattccctggaggttttggcccccgcttctttcaggatgcgcgccaggctgctctttccggtggcgatggcgcggtccaggggggtggccccgcccctggcgcggaaattcacgtccgccttgtgctcaatcaacaatttggcggtggcgtttatggaattttcctgaaggccggaaacgtccgcgagcacccacagggccgtttccgaattggccggcttgtaatggcctagccgcgacttgccgttgggtttattggggtccgcgccgttttccagcaggaacctgacgctctcctcattcccgtacctggcggcggaaatcagcagcgttttgccgtcattgcacacgtaatccgggtccgccccgtgttccagcagataggctgcctgcggagccctgggattgaaataatgcctggaaagaagggaggaagaagcgtttttatactcgtcggaccggccaatttccagattgacgtccgccccgttggcaatcaggaggtccgccaattcaaaaaactgcatgtccatcgccagggccagcgcgcaggaattatcccccctgatgccctccccctggtaattcacgtccgccccggcgcggatgaaagcgctgactttggaaagctccggcttcgttccctcttccggcagcttgtcatacttcctcttgccgttgatggtgacagaggtggttgtgctctcccgcgcgggcctgtaatccttcagcttgtacaggtattcatacaattccagccccttcttctcccgggtggcgcggtcggcggaggggtccacgggcagcggagcctttttgggaatcaggcgcagggagcgttccgccgtgcggtgcccctgcctggccgccttggaaaaccagaatttggcctgggagggattgcgcttgacgccgtctcccttcaggaagcagaggcccagacggtactgggattctgcattcccttccttcgcttccaggtagatgcgcctcccttcttccggggtgacggcgcggacggcgggcgaacagccgaggaagacggcggctgacaacagcagacgggagtagtaggtcatagtggggtaggggggatgggggagccttcattcaggaagacccgacggcggccagcaggtggacgtccagcgccagggcttcatgaatgttgaaattcaaatcgtcgcggagcctgttgagggcttccatgcgcttcagcaattcgttcacgggcatctgtgcggccagcgtgcgcacttccggatgaatcggcgtgacctccggagcgccggaggcgatcagggccgcctggccgaaccagctgatgagcaattccagggcctggttgcgctgttccaggtactccgtctctatctgggcggtgttcgcgtccttgttgcgggactcccagtcggaggtatccgtgccctgggcggcttccttcgcttcatccttcagggcctggttcaggtttttggtgatggcggccttggcctccgtcatgacgtccacgaacttgctgcggaaggccagcgcggccaggtcattgtccagattgcggcaggtctccagccagtggggcagcagggcctcctggatgggggtgagcctgaactccgcggattgcagcaggttgacgcgcacgcatcgggaaataatggtctggagaagctggtccggctgggaggtggacagaatgagcaggcactggctgggcggctcctccagggttttcaggaaggcgttggcggcctcgtcattcatgcgctccgcatccatgaacacggctatcttccattttccctccgccgcgcgctgctggaggaaaggttccaccgcgcggatgtcatcccgcaggatgcggcgcgacttggacttggggcgcaccaggcggcaatactcgtcccgcacgccgtccaggtggtccgcccggatgccgttcatcagctccagcaattgaaggatcaggcgggaggctccctggtgctcgtctcccacaatgagcagggcatggggaagccggttgcgggagaaggcggtgcggagcaggtcgaacgcttgggatgccgtgaatgccatacgctccctatgaaaacatttcgttgcgtcagggcaacagaaaagattggtatatgtcggatatttcatgtactaagggggccggttatggaacaaaacgacatctcatcccggattgtctttgccgaccgcggcaaggtgaatgtggaaaaaggcgtggaattcgcccccgaatttgaccagaacggcctgattccggccctcgccatggaccacgttacccatgaaccgctgatgctggcctacatgaacgcggaatccctgcgcatgaccatggagctgggggaagccgtttactactcccgcagccgccaggaaatctggcacaagggcgcgaccagcggccacgtgcagaaggtgaagcaaatcctgattgactgtgaccaggatgccctgatcgtgctggtggaccagtgcggcgccggagcctgccataccgggcaccactcctgcttctaccgttccgtgcccttcggcgaggaactgaaggcgcagccgcaggggcaacccgtcacgctgcgcgaagccgacggaggcgttgtttttgacgccgaggccgtgtacggcaagggccattaactcttttttgcgcgtcaatctgcgttcaccgggttgacgcgccctctttttctgctgtaaagtcatgaatgtgaaaaagctgcttgtcatgatggccgccgtctccggaacgctggtgctgtgccagtgctcttcggaagcgcctccgccccccggaaccgtccgcatggtggaccagcaggccatcgccctgatgcaggaagccagggcgaaggaagcgaaaaacgacctgtccggcgccatcaagaaatacaagcgcgtggtggaaaagcaccccctttccaaggaagcgccgcaggcccggttcagaatggcggaactctatgaagcccgcaaggaacctgcggatgcctttgaccagtaccagaagctcattgaccgccacccggacagtccgctgtacaagcaggccatggaacggcagaaggaaatggccttcggcgcggcgagcggcgcgctgaccaaccgcgtgctatggatgtttgacgtcaggatggaccccaagaacgttacggaatggctgaaccacgtgcgcgacaacgccccgtacgcacccaccgccccgcaggccatgaacgtgctgggcagctacctggccgcccgcggccggatgaaggaggccattgaagcataccagaacctggtggacaaccacccgcactctccgctggcccccacggcccagctccagatagccaccctgtaccgccaggccgccgcggacggcgaccgcaaccacgtcaatgtggcccgcgcccaggaagcgtatgaagactacctccagcgctaccccaacagcgcccgcgccggagccgcccgctccgacctggccgccatgaagcgtgagctggtggcccagcagctggaagtggcggaatactacctgaccaagatgaaagacaccgatgcggccatcttctgctaccaggaagtggcctccaagggcagcgtcaatcccgccgccgccgccaaggcgaaggcacgcctgaaaaaactgggcgtcaccagcagataacaggaactctacgtccgcatgaaccgtatccggaacgtcttcaaacttcttctgcccgttctgtgcctgctggccggttcctgcggctaccagctcggcggcaccaagccgcccaagctggaatttgcgcagactgtcaaggtctgcctctttgccaacaactccctggaaccccgcgccgccacgctggtgaccggcgcgctggcggatgaactgcagcgggacggcacctaccggctcagcaccggtgcggatgcggatatccgggtggaaggagaagtgtactccatcaccttcgaccagttgcgttccagccgggaagacacctacaaaagtacggagctgggcctgcgcctggccgtcaagtaccgggtggtggacgccagaacgcagaaagtcctgtatgccagctctgcggaggaagtgggccaattctttgacctgggcaacatccagacggcccggaccaacgccctctcctatgcggcgcggctggtagccacctccattgcggaaaccctcaccaacggctagacctgtccggctccggaaaatttgtgcttatggcggaagtggaatacagcgtttacttcgttccggtgccgatcggcaaccgggcggacgtcaccctgcgggcgctggacgtgctgcgcaaggtggacgtcattgcgtgtgaagacacccgccattccggacttctgctctcccactatgaaatccgcaagcccctgatgagcatgcacgaccacaacgagcaatcccgcgccggggaaattgccgcccgtgccgccggcggggaaagctttgccgtgatcagtgatgcgggcatgccgggcgtgagcgatccgggctaccgcctcattcagacgctcaaggaaaaggaagtaagcttcaccgtgcttcccggaccgtctgccgtggtgacggccctggtggggtccggactgcctacggacgccttcttcttcggcggctttctgcccgtcaaatccggcaggaagggctccatgctccaggcggcggtggaagcttcccataccagtatcttttatgaatcaccccaccgcatcgtcaaaaccgtgcaggcgctggcggcgctggacccggacgttcccgtctgcgtagccagggaactgaccaaaacctttgaaacctaccaccgcggcccggcttcccggctggcggcggaatttgcggaacgtgcccccaagggggaaatcgtgctgctggtgggcggcgtaaatgcgccgcgggccgtcaattaatgagccaaaggcattaataacgcaccgtcaccttgaccgggcggtggtcggaagcggcaggctcttcaatcaccctgcgttccgccaccttgaacgcctccgcctttctccccctgtacatccagatgtaatcaatgcattccgccggttgatcggcagggaacgttttttgggaaaaatcgctcagcggaatgaaatgcttcttcatccgggctatcggttccgagcctggcgtcaaattaaaatctcccgcaatgaaaaagggcttcctgcactccgcggccagagcggcaatcatgtcgatggaagcgttgctatcctcccgcgtcagggacaaatgcgtgacgcaaaaacagtaatccttgaactcggccatcagcagcacgcgcgcctcctcccggccgggcaaaggaattcgcttcacgctcaaaggcttctccctggataaaaggccgactccataggaaccgcccgaataatcaatggccttggcgtacgtccccgtcaactttgtccttacggccaattcctgcaaagtgtccctgccgccgctcctttttgtcttgctgtccagttcctgaagggccgcgacatccggttttgcctccgcaatcacccgcgccgtacggtcataatcccgcttgccgtccatgccggtaccgttctttacgttgtaactcatgaacgtggcttccccgccccacagggaaaaaggagccagaagaaccgccgcggctgcgcatggactgaaaatgaccggattcatacctgcaaaaatggaatttagggcctgttgttccgaacggcccggattacagataatacgcatgcctttcccccgtttcttgcagagcctctttccttcctccgggtgagtaaatcccgtggatgggcgaatcaacaacacatctcccgctccgggaaatttcctcatccggtttccggacacccgccttttataccctttccgccccatactgccggaaaatgacgcaggtcttatcaacttgacgcctggaagtgtgtcatgatagtattctatcatcatgctggaggataggagatcacgttcctcgcgcaagacaccggatttggtgactgatgagcttattatcattcttcatgaggcgggcatgctggaattcaatgacatcttccagcgtaccgttatcgtgatgaagcaaaagcacatgtccctgggcggtgaggaaatcctgcggctgcggatttatgaaaagctccagggcctcgtgagcgccggcggcctggtgaaaaaaggccgcgaatacacggcgcagcccaagctgattacattgaaatcggaaacgttcccggacacacggttgtgattttaaaagaaatgggcaggatgggccggattttactccatgcctcccatcctgtccatgaacccaatgtgtggtttagcgtctcaacttcttagaaattggtgcggaaggcaatgttgtagctccagccggtgaagcctttctgcttgctggcgtccgtgccgttggaatgggcgtattcaacgcccgccatgatcttggccatgttcgggttgcattcgaaaatgtagtagttgacgcccaggtacagggcctgcatgcagtcggaagtgccggaataggtagagttctgcgtatagcgcttttcccatttcacggcgttgctgcccgccgccatctggtagcggaccacgccttcccagttgggggtgaatttgtaggacggcatgatggtcacgccgaagacgttttcagcccctgccttcatgccaatgacgttgaagccggccatcacttccgtcatcagggagaaatccccctgggagccttcccaggtcagcgccaccacgtccttggcgccggtgccctggtatttggatttgaagccgtagccggtgagcttttcatacgccttgttttgtgcgtcgtcgccccagttggtgaagttatgggcgtaatccagccacaggcggctttttttcaggaaaacgtcgttggacgtatcatagctgagcgtgccggtgacgaagcagttgtcccgggagttgaaggcgggttcaatgcggttgttgaacgtgccggttccggttcctccgttgccgttcatccagatgcccgcggcccagccgagcttgtcattcttgtcggaattgttcacctggaacccgtagttggtttccgagcggagttggttgaccagcatggagcgttcaatggtcaggatggcggaggaggatgtgcggtattccccggtgatgcgcggcttcattttgccgatggcgtaggtgacggggcccctcttgtattccagattcagttcatacagggagtaggtcaggtcggaggtgtcccaggtattggttttcgcgttgtagctttccagaccgtccatgccgccgatgttccagacgttgttgagcttgaagtttttcaggaacttcatgttgaagccggcgcggaagcggcgccattcgtcgttgaagcggcggccgttgccttccttttcacccatcacgcgcccttcgccgttcgggtcaatccagtccagtccgtactgcatgcgcagggaaacgttgaattcctggatgtagggattcttgtgatcccgttccgcattgaaccacttgaaacgttcgccgagccatttgcaggtggaaaagctgtcgcgggccagcagaacgtctccggtggatgccgtggaaggcgtggcggcggcaaaggcggcggctccgagagtcatgatgccgatgacggggagagtataggttttcatttgttttctatggttggtgtgtgtctgtgagaaggtcttccggggaaggttcttcctcacggagacggcttctgtctatcaaaccagccacagggctgtccaaggcttaagggtgacaaaatagccacccgtctcattgaaggttacacggtaatgcggagccatgctttggcggccagggcgtccgcggcggcggccacttccgccttccgcttgctggctccatggccggaaccgatggcgtgtccatgccagaaaacgcgggagtgaaaacggttttcggcgtccctctgccctttttcttccgtttcataggaaggagtttcgggcaggatgtcctgaagaatggcctggagttcccccttggggttgatttccttggggtggctggccgcggagtccagcgcttcatgaagaacgcgcagggccacggccttggccgtttcatagtcggagtccagcgacatggccccgaagacggattcaaacgtgttggcgatgatggagttttttccccgtcctccggcccgttcctccccttttcccagggcaatgtatttgtccagccctaggatgaagccgtatttgcccagattggcgcggctgacggtgcgggcgcgcagttgggtcagctccccttccggagactggggcatgtggcggtaaaggtactgtgtgacggcaagctgtaaaatggcgtcgcccagaaatcccagccgttcatatgtccggcgcgtttccggcttgctgtccgtgctggggtgggtgagggcctgcacgagcaggtccgggtttttgaaacggtaacccagcttgtcttccagcgcggtatagttcatcccggaaatgctagggccgccaattcggaaatgcaactccaaaggaagggtgtttccggcagggcggggcacgccttttccgcgtcatcccagccgctccgcggctttgacatatggctggagaggtgtaggatggtacgcgaacgaacgttagagaccgcgatgaaaaagattgatccaaaggagattcgggataacgccatgcagttgatcgggcacgactggatgctggtgacggctggaacgccggagcatttcaatatgatgacggccagctggggcggcctgggcttcatgtggaagaagcccgtggcattcgtggttatccgtccccagcgccataccttcggcttcattgaggccggggaggagttcacgctttccttcttcagccatgagtaccacaaggcgctgactgtttgcggcaccacgagcggacgggatacggacaaggtggccgcctccggactgacgccgtatgcgacggagaacggcaacgtgagttttacggaagcgcgcctggtgctggaatgccgcaagctttatgcggaggctctcaatccggaagcctttttggacaagaccattgtaccggagtggtacgccgcgcgggatttccacaagatgtacatcgtggagattctgaacgtttgggtgaaggaataacgtgccggaaatgccgccggggtgaattcttgtttatcgtgattctcctcagtttgtttagagcggtttgagcgtggaatcctccagccggaaggacggcagggggcacggggtatcgtgcagccagtccagatgggtggtggtgatgaggctttgcgcgtccgccgggagcgattgcagaaaggccacccggcgcgtggggtccagctccccgaagacgtcgtcaatcaggtggatgggcgtatgccccgtttcttccgtgagcagggaggattgggccagcttcatggagatggcgatggtgcgctgctgcccttcagaggcgaactgtgcggcgctcctgccgttcagcgtgatgtccaggtcgtcccggtgggggccgttctgggtttgcccgtaccggatgtcccggtccacggcggcgcacagccgttcatacaggtccccttcctccgaggcgcggtaggccacggccacctgttcctcccgtccgccgatgctgcggtaggcgagggtgatgtggggggccagcagcgtcagcaggctggcgcgcaggcttttcagttccgtgccgtgcagggccagctggcgcgtgtaggcgtccagctgcagcttgtccctgtgcctgtgcttgagcaggtagttgcgcgttttcagcgccctccggtagctgaacagggccagcctgtagccggggtgccactggctgcccagaaagtccatgtattttctgcgggcgtccgctccggcctgcaccagggaaagatcgtcattccccatccataccacggggtagctgtccgccagatagctgcgctggtccttgcgcggctctccgttgacgcggaggtccggagcgtccggggtccacaagatgcgccgggcctgccccggcagctctccgcggatgccgaaggcctgctttccgtgagcggccagcgggccgggccgggcggtgcgcggggattgcaggcgcagcaggaagcagacggcttccagcaggctggtttttccctgcgcgttgtttcccaggatgatggccccctgctgcggaatctgccaggagaagcttccgtagcagcggaagtccattaatttcagcctggagatcatggggcaggggaaggagggattattccgcagggagggcgcggatggcgtccatgatcctgtccgtcaaatgctggtacgcctcttttcccctggcgttaagttccgccggagtgaaggggatgggatcccccaccgtgaccgtgacggggtggagtttggggaagcgggcgccgatggggaaggcttcatacgctccgctgatgcgcaggggctgcacgggaaccttcgtcttgctcagaatgaggccgatgccccccatgccgtcgtggatttcaccgtccggagtgcgggaaccttccgggaagacgagcacgcgcttgccggatttcagcaggcggatgacgtgcttgaggctggcggcgtccgggttttcctggtcgatcgggatggccaggcagagcggaagagcccatttgaagatgccctggaacagggtcttgcgggcaaagaaatagatgccgtcctcataggagatgcccagcatgggcgggtccagaaagctctggtggttgctgacgatgagcacggggccgtcttcaatgagcttttcccggttgacgactttccaggaaaagaaggctttggaaatgcttttaaagagcgtgtagaaaacccagtagaaggagttcatctggcggagagtttttgttgaatgttgtcggtaatgaaacggacgacctggtcgatcgtcatgtctgacgtatccaccagcagggcgtccggagcctgggccagcggggcggtggcgcgggaggagtccttgcggtcccgttccgcaatggagtccgtcaggccttccgcggcgcggcgggaggccctcacttcctcggaggcggtgacgaagtacttgaacggcgtgtccggaaataccacggtgcctatgtccctgccttccatcaccacgggttcccggcggttgtattcccgctgccgttccaccagcagggagcgcacttccggaatggccgcgatggtggagacgtggtcgttaacctgcgggcgcgtgagttcttcacccagcacgcgttccccgcacaggaccacggagcggctgccgtcctttccgaaggagaggggaacggaggacagcgcttccagcacggcggccgtgtccgcagggtcgatgccctgttccagcatataccaggtgacggcccggtacatggccccggtgttgatgaacgtgtagccgaggcggtccgcgatgagcttggcgacggtggattttccggatgcggcgggaccgtcaatggcgatggctggatgcatgagtgtcttctatgttggaaatgggggctaaagccgcttggattgtagctttgcgccccgtggaaatcaagactgcgttccggcggcccgtgcaaaaagagtttcactttttcctgtaaatccgttatacagcggggcatggcccaactcaaacacccgaagatggtggacatcagagacattttggatgagaatacgcgccttcccgccctggtggccgcgtccgccgaaaagttgctgggcctggaacgcttgaacaaggcgtacgacaagatcgtgcgcgacaaggaatccggttctccggagaatttcttccagcttgcttccagacatttgaacctgaagctgcaactgcgcccgggggatctggaaaatatccccaagaaagggccggtggtcgtggtcgccaaccatccgcacggcctgtcggacggcatcatgttcggagagctgctcacccgcgtgagggaggacgtccgcattctggcgaacgaacagctttccctgtgccaggagttggaaccctggctgatcaaggtggacgtgtacgaggatgagaacgccaagcgcaagaatctctccggcatgcgcaagatgatctcctggctgcggaagggcggcgtcctgggcattttccccgccggcacggcctccagcttttccctggcccacaagagggtgacggacgatccctggaacgcgaacatcgccgccatcatccgcatgacgaaggcgacggtggttcccgtgcattttccggggcgcaacagcctgctgttccagggcgtttccctcatcaaccgcaaggcgcgagtggctttccttccccgtgaagtggggcgtgacgggcgccgtacgcaccgcatcgtggtgggcaagcccattccgttcagccagcttgggcagtatgattccgatgaagccatggtttcccatctgcgcctgcgcacctacctgctgggcaagagttatgaaaagagccgccgtccccatgtgcacaggaaggaccggaaggcgaagatggccgcactgattccgcccgtttccgtgcaggacatgcaggcggagattgacgcactgcccgcggaatgcctgcatgcccgccaggagaacggagactgggacgtgtacgtggcggacgccctgcaaatccccaatatcctgattgaaatagggcgcttgagggaatacaccttccgccaggtgggggagggctccggcaaggcgtgcgacctggacacgtacgacaaccattacaagcacctgttcctgtgggacaggacccaccggaagattgcaggggcctaccgtatgggggagacggacaagatcatcgcccgctacggcgtgaaagggctgtataacggggaatatttctcctttacccccgccgccctgaaggtgctggaccgctccctggaaatgggacgcgccttcatcgtgccggaataccagaaaaggccgctggccctcggcttcatctgggagggcatcggccagttcatggcccgcaaccaccattaccgctacctgttcggcacggtaagcatctcccgtgattacaccaacctttcccgtgccctcatcgtctcctacctgaaggcgcatgaaatggactccgtgctggtgcatgaggtgaaagcctacaatccgccccgcaaggcggacctgaaaaggtcggaatcctgtatcctgcccattggcctgacggacgcccaggggctctcccagctcgtggcggacattgaggaggacggcaagggaattcccgtgctgctgcgccagtacctgaagctgaacggaaaaatcctgtccttcagcgtggacaagcatttcggcgatgtgctggactgcctgatcctggtggacattttcaagtctccggagcgttccatcaagcgctacatggggaaggacacgtacgaacagctgctgccctacatgcagcgggagagggaagaggagaaggcggcggaatagttccgcaggcgttttttgccggtttccggtccggtttttcccttatccggctagttgaaatgcctgtagcctgacggaagggcggaggagggttccgtcgtcatttccccgataacggtgaagggcgtttccgggaaatgctccgcggccagccgggcaacccgctcccggtcgccgggacggaacgtgaccagcagctcgtaatcctccccgtctcctgcggcctgcgccgcggtgaagcccgggcgcacgggaaggagttctgcatgaatgcggaatcccagtccggaggccgcggccagccgtggaaggtcggttcccagaccgtcggaaaggtccatcatggcggtggccaagccggaggcggccagtacgccgccctccctgacccgtggaatgaaggaaagatggtgccccgtgggaaagctgccgccgagcacgcccgtgacggcgagcaggtctcccgcgcgcgccgtgctgcgcaggacggctttcccttccgcaacctctccggtgagggccacgctgatgatgaggccgtcttccggcaggccggagctttcccctccggcaatgctgatgccgaattgccgtgccagccgtcccattccccggtaaattccttccacctgggagacggggcggtccgcatgcacgaacagggtcaccagcgcgtgaagcggtgtgccgcccatggccgctatgtctgagacggccctagccagtgccttcctgccgatcagttcgggatccgttccaggcaggaagtgcatgccttccaccacgcagtccgttttcaggagcaattgacggtttccggagctccgggccacggcgcaatcgtcccccggtcccgtgaccaggaaggcgttggagggcatcaggggcaggagccgggccaccagcgcgtcctcccccgtctgccggatggtgggatcaggttccatagggaaggagaacgccgggatacaggatgttgatgagggtggcggtgttaaaaatgcagtgggcgatgatgggcgtccagatggagcccgtgtattcgtacagcagcaccagcatggccccgaagattgccagcggaatgaagggcaccaggctgacgtggatgatgccgaagagcagggacgtggtgaccagcgcaaaccaggcgcccgtgtactttttcatgattgggtacaggtagccgcggaagatgagttcctccaccagcggggccgcgatggcggcgctgaagcagatgaccacaaccaggggaatatcgctggaatgccgcagcacggagacgatggactgctccgccggagcgtgcgtgacctgttcaatccactggaacaggcccgccctgtccagcaggaagtggatgaccagcaccagcaggtagcccgccacgggggcataaagaagggctttcagggaatgttttttcagccccagcgcctccattctgcccgtgtggaacatgcgcaccagcaggacgaaggccaggatgaggttcaggcaggtgccgttgaaaatcttgtagccgtccagctccatgtttgtagtggtgggcggagcggaggctcccggaggcgtggccgcagccatcagggcgcccaggctgaagtacaggacgatgatgccgcacatggcgatgtccagcatgtccagatggtccacggggatgtgccatttcagggggcgctggatgttcggcgcatgggcctggcggaagatgcccaccgccacggcgatgaacatgacggcaatcagggcggaggagaacagggtaataagctggtccgttaattcattcatgaaacaggtatgcgtggaataggccgcccttccggagcgccacgccggaataaggacacctgcttctttagtgaaaacacggtgattttccagcagaaagtgagctatcgccccgtactccgcaaaaaaaatcatgaaggaagggaatgaatacttttcaaagaaaagcgggtatgctacgtttccaacggattattgccatgaatattcaacccaaaatcacgcctgtgctggaccccggcttcgtgccggccgttctttggaatcaagcctttgaggccaaagccgccgccgatcccgcttctcatcaagtggacatcgctctgacccgcaatgacgggacctgcttccgctggtccggcaagctccttccccacaccggagaaaacgttgccctgaatgagacctatgtggaacgcatcgtgaaattcctgctgtggcagaagggcggcaatatcatcctcgtcgccggggatgacgctattgcggacatgctggcctcccgctactgcaagggcggcgcccgcgaattcgactgggatttcatcggcaagaagatttacggctcccccattgaagtgaagaaggtgtccgtggaagaactgcctgaggaatattccggctccatgaccctgggccgcaacctggacggctaccgcatcggcttcgacctgggcggttccgaccgcaaatgcgccgccgtggtgaacggagaagtggtgtattccgaagaagtggtctgggacccctatttccagaaggatccccagtaccacattgaaggcatccaggactccctggaacgcgccgcagcccaccttccgcgggtggacgccatcggcggttcctccgccggcgtcatcatcaacagcgaggtgcgcacctcctccctgttccgcggcgtcagccaggaagacattgaaaagaccctcggcaaggtgttccgcaccctccagaaggaaaagtggaacaacatcccctttgaagtggtgaacgacggtgaagtcaccgccctcgccggagccatgggcatgaacgacaacgccgtgctcggcgtagccatgggcacatccgaagccgccggctacgtggacccggaaggccacatcaagccctggctgaatgaactggccttcgctcccgtggattactcggaagaaggcggcgtggacgaatggtccaaggacatgggcgtaggcgccctctacttctcccagcaggccgtagcccgtctggctccccgcgccggcttccagtttgaaggcatgcccttcccggaacagctcaaaaaggttcaggccgccatggcggaaggcgacgaacgcgcccgcaagatttatgaaaccatcggcgtgcacttcggctatgccattgcccactacgccaggttctatgatatccgcaacctgctcttcctgggccgtgtggcttccggagacggcggccagatcatcattgacaaggcggaggaagtgctgcgcaccgaattccccgagctgaagatccagctccgcgtgccggatgaaaagaccaagcgccacggccaggccgtagccgccgcttccctgccggccctctcctgacaggaggaatgaaatttgcgggagggaccctgtatggggtccctccctgctcatatccggagggggacttttgccggatgcgctgaacagcctctgccgcgccggattcccgcccctcctttttccgattcccgccccgacgccctgcgttcatgaatccccagcaagacaacattgttcattgcccggaatgcgggcaggccatggacgtttcccaactgcctccgtatgccaacgccatctgtccgggctgccaggcgctgacgcgcgtgaaaacgcgcatgggcccctaccggattaccggaaaactgggaaaaggcggcatgagcgtggtataccgggcggaagattccgtgctggggcgggaggtggccctgaaggtgctgaatgacacctatgccggggatgccctgcgcagtgaacgctttgaacgggaggcccagatcatggcgcgggtttcccatgaaaacctagtgcagatttatgccgtggggcgcgaccagggccttttttacattgccatggaactggtggagggcagcggcctggatgccctgattaccgcggaagaacgcgtgccggaggacaaggtgctacgcctgacgctggatatcgtgcgcggcctggacgccgcctggaacgcgggcctcatgcacagggacatcaagcccgccaacgttctccagtctcctgacggagtcgccaagatcgtggacttcggcctctccctgctgcacagtgaatccgacgtggagcgggaaatatgggtcactccctattacgcagctccggaaacgctgctgaggggagaagaagacttccggacggacatgtacgcgctgggagccaccatgtaccatttgctggtgggcgctcccccccgcgtggacgcttcccagtcttccgatgtccttctggagaccaagaaaaaccttccccgcctggaacaggtggtcaatgacgtctcccccatgacctgcttcatcgtggacaggctgatggcttttgacagggaagacaggttctcctcctatccggaattgatggatgccgtggaacaggccctggaggaatacaccctggccatgcaggaatccggcctcacctggtcggaacggcgcgcggcggaggcgcggcgcgtccgccgcaggaaatgccgcattatcgtcatttcctccgttgcctccgtagtggcgctggggttgggcatctggggctgggcggcatggcagaaggggaggggcgcttccccgggaacaccccctccggcgctcactcctacggcgggaacgggcactaccccggaggacacggctgcggcggaatcgcggctggagcgcagcatccgcttcggcaagctgttcaatgaagcccaggaatccctgaaccggggagacctggtgaaagccgccgccatgttcggggatctggcggaccagccggactgccccctttccacctcactctgggccggtctgaaccaggttctgtgcatgtggacgcgcggccagttcccggaaggggtggagcgcctggaagagctgagcaggaaggtggaggcctgcaaggaccctgcggaactggaacgctccagggacgtcggcaacctggtcatgtacttgagttccggggactggtcttcccgaatgccgggtttgcgttccaactccgatctggccgtgcattactatgtgggcatggcgctgaaatcctggtactttgccggtaaatggccggaatacggcgtttttctggacaaggtggcggccgatgcggcggacgaccgagacaggaacgtccgtgagctggcttccgcctggctcaacaacctcaagagatatacggaccagtacgaacgcctgaaacgccttcaggacatgccggaaaagacggtggcggaagtggaggccaaacggtccgccgcagacttcctgcgggaacagatgatgatcggggaagtgtccgcgatgcctccagcctatgctgcgctggaaggaatgctggaccatttgagaatgcagtaccagacagcccgtgactgggaggcggcggaagccgtgaagatggctgagaggaaaaaggaggaggaaagacaaaaagcgctggaggaggaaaagaaaaaggaaaccctgctggccgctcagtccagaagctatgaagacgtttgccgggaagctgcggacgtcatgaaaaaaaccggggactttgaaaaggcctccgccgtttacggcggggcggaaaaggttatttcctcccccgccgtcaaggccagactgtccgtgcgccgggaaatgacggatcaaatgctgcccctgttcacccgcatggagaaaattctgcccgctctcctggaaaagaaacctggaaaacccctggtgctgaaagacggctccaaggtgcgcctgacagggatgaaggggcatctgctgactgtggaaccgcaggacagccgggaaggcagtgatgcgtaccaggtcagctggaacgagcttccgttcaactctctgtatgccctggcgcgggaatgccgccagaagcagcctgcggaattctcccccctggcggatgcgtattccaagccgctgcttattttcggcagtctgacggagaccatttcccccgcccagcaggaaaatgcgctgctccagatggaccgcgccttcattgaaaaatggaacctgtggatgagcggtctggacgcggaggagacgcccccggaagacggtgaagaatcggattaattccggcaggctcttggccggaggagggcgggaaggccgtgccgacggtggaaaagtcccgtctggaaaaggaaccctgcgccggttttgcggaaaagtaggcgtgatgaagtaaaatttgcttgcctaggatactccgtacaggtctcatagccgcatgagactgatcagctttttgacgctggcatgcgtggccggcatcctctcttcatgcggttgtgactgtcacaaacacgcggacttcgcgctgaaggactaccagcccacctccagcaagcaattccgttaactgcttgaatatgtttgaaattcgtgaaaagccggaaatggtggagcgagccatgctcgtttccatctacttcgacccttccgaggccagggaaaaacaggccatgctggacgagctggaagaccttgtcaccaacctcggcatcagcattgcaggcaagcacctcatcaagtcccgggacatgcacgccaaattcctgtgcggcaccggaaaagcccaggaagtaaagcaattggcgctggactgccgggcggactgcgtggtgtttgacaacatgctttccccctcccagcagcgcgaatgggaacggctgattgacgaatgcgtgattgaccgtgaagaggtcattctggatatctttgcccggcgcgcacgcacgcgggaggccaccctccaggtggagctggcccgcatgcagtattccctgccgcgcatggcccgcatgtggaaccacctggaccgccagggcggcggttccggaggaggcaagggcggcggcggagccgccaggggcgagggcgaaaaacagattgaagtggaccgccgcctggcgcgcgccaggattgaagccattcagaaggaactggccctggtgacccggcagcgcgccacgcagcgcaaggaacgggagcgccaggccgtagccacggccgccatcgtgggctataccaatgccgggaaatcctccctgctttccctggtatccggttccgaagtcatggcgaaggacatgctttttgccacgctggacaccacgacgcggaaaatagaactcccccacgggcagcccctgctgctgacggataccgtgggcttcatccgcaaccttccccaccgcctggtggaggccttcaaatccacgctggaggaagccgtgctggcggatttcctggtgcaggtggtggacgcctccgatccggaagccgtgcgccattatgaaaccacgctggaagtgctcggcgagctgggcgcgggcgacaagcccatgatcgtggtcctgaacaaggtggaccttgtgccggaagaagagcgccacacgctggaaaccctgttgaagccccacttcaacggcagggtggtgcccatgtccgtgcaggagggtcatggcgcggaagacctgctgaacgcctgcgtggagatgctggaaagccgcgtccggcgcgcgcggttcctgattccctatacccggagcgacctggcggccgccatgcacagtgaagggaaggttctctccacggaatacgtggaggaaggcaccctgatagaagccgtgctccccgtggcgttttataacaaattcagccgttttctggcggaaaaatgatttcctcttgattgcggagaaaccgcatcctcggcagggaaatcattcttttttcttgaatttttgtatgttggatatattatatccagcatctataatgaataagttgtgctgtattattttgtgcggaataatttcctgggccactgtaagcgcccaatccctgcctccggatgcccggaaattgaaggaacaatatgagaacatcctttcttccattaatcagaaatatgaggcgtccaaattgaaagcctatcgggattccatgaacaaatatgccgcgaagaatgacttcgcttctgcggcggaactgcagaaagtcgtggaatatttggagaaccgcttgtcagccaaagaacttgttgggagggatgaactgtcccggatggaaaaagtttctcctaaagtaggcgtacagatgaaggaaattcaagaagatgtggcgtctaaaagaatgaaggaaaggaaaaagacggacaaggcctacttggatgcccttcttaaaattcagaaaaagtacgccaatctcggtaaaataaatgaagcgctggccattcaaaaggaactctccgcagttcgtgttattgcctcttttattgggcggtggaaaacggttaaaggggataccgccgcgaatgaaattctttatttgaatgatgattgctccgtctttttgggcaaggacggaaaagaggttacttggttgggccacaaatcattcagggtatctccccaggcagagaaaaccattgagctgttgaacgacaaagggaaccacagcggatccctcaagatgctttccaattttgaaatccagtcgccgtctggctggaaactgcgcaaaatgaatccctgatgaagaaggcaggagcgttaaacgtacatttaatgctcagtaacccaagctccgcaggcattccaccacctccctgacgggcagcccgattacgttgtccgtatctccgcgcacggaggaaatgatcatctccccgtgttcctggaacgcgtaggagccggccttgtccatcacattcaccagctccatgtagcggcggatatcctcttccttcagctcccggaacgtcacttccgtcagcacggccaagtctttcactcccaggggggaccggatggaaaccgccgtgcacacgtggtgcgtccgtgcagagagcatccggagcatggaacgggcctcttccccgtcttccggtttgccaagaggaaggccgtccagaaaaacgagcgtatccgcgccgatgacggtggaatccggatgttcccggaatacggcttgcgcctttgcccgcgcattgtgcaggcagagttcctgcggaggcatggcggcgtccttcagctcctccgtatcccgtacgacgagggagaaaggcacgccggccttcgccagaagctcgcgccgccggggggactgggaggccaggatgatggggggaagcatggaaggagagccaatagttaatatctattaactattacctgttaattgttaactatctgcttcccataatccggtggaaggcctccggagaaatttcccggatggcccggatgatgttcctggagaatccggccatgcgcttccgtaccgtttcccggtcttccgcggattcaaactccatgcccaccagggcgcggcccacgcgttccccggtataggtgtaattgaagtagcagagggatgccaggtccgcgatgcgttccatgaagtcaagaaaggctccggcgcgttccggaaattcgatgtggacgaacaggggatgctggcacagctccgcctggtagtgaatcatgcggaagcgcacgtcgtcgtcctcgctgatgtcttcaaactcaatgcccttcttcttcagcgtcgtgcggatggtgtccaggtcttcgtcagaggcggcgatgccgaacacggggtactgggtgttgccctccgtcttgccgtactgcacgtccaccagcgtggtatcctgcgggatgtggcgcagatacttgagcacctggccgcgcttggaatccatggagatgcgcaggtagcgcgtttcatggttgccgatgcccgcctggcgggcgatctgggtgaggtgggtgaaatccatgttggctcccgaaatgaccacgaagctcttttcctccggcttcacttcaccttcgttccattgtttcaggaatccggccaggctcatggccccggagggctccggcactacgcgggaagattcccacatggcgcggatggcctggcagacttcgttattggtgacggtcacgaactcgtcgatcagttcccggcaaaggggataggtcaattctccggggatatggacggcggttccgtcgcaaaaaacgtccacgtaatccaggttcacccggtgtccctgctcaatggaggttttcatggaggcctggtccacgccttccacgccgatgaccttgatgtggggccagaactttttcagccagcaggctacggaggcggccagtccgccgccgccgatggcgacgtacgcgcggtcaaaagggccttccccgctcatcaccacttcatccgccagcgttccctgtccggccatggtcaccagatcgtcatagggatggacaaaagtgcttccgtgggtttccgcgtactcgtgggcggctgcggccgtctcgtcatagcagtctccatgaagcatgatcttcacatgcctgccgccgtggcggcgcacttccgtctgcttcacttccggcgtggagcggggcatgaaaatggtagcgtggcagttcaggacgctggccgccagggccacgccctgggcatggttgccggcggaggcggccacaatgcccttgtcccgcgcctcctggctcagtgcggccatgcaattgaacgctccgcgccatttataggcccggatggggcccaggtcctcccttttggcgtataccggggccttgatgcccggcagattcaatcgttgaagaggagtcggttcgccaaccgtgtaaacgcgctggcgggcttgcagtatttcctcggaaagacggtccgaaagtatgctcatgattgtaatgctggctcccattctaccgggttccggccctcttttccagtaaaacattgccaccggactgcctgtttcccaggtcctggactttccgggcacaaaaaaaccgcccggaggcggttgtttctttgaagcaaggtggcgaagcggacggggctcgaacccgcgacctccagcgtgacaggctggcgctctaaccgaactgagctaccgctccgtgaccttggatgctgtgttcctgccttgcggcggggacgtggaggcttatacaggcactcccatgggaatgcaagacaagaaatcactttttcctgcatgcaggccgcgcttgctggaataagcgggagaaatacccgtgcggatttaaaatccggaaatgctccttaatgagaccagatatataataaaatattgataatgcccgtacttggcgccggtattcccactcttcttcccttcctacgcatcaagccgttcaattgtcctaaagcgcttggcattaaaaattgtcattgactccggattttaaatccgttaattattactaacgatatagtctggtatataatttattattaattatcaacacgttacaaaattatgcgtccgcatttgcccctccctctcctgtccgctcttctggcctgtttcatttctccgtcatgggctgcctatacgttgacgggcaacggagaaacgacgatatcctttgccgacgaccagtatacgattacgccgccggcgggggatccagtgactcaggcggattcccccggtgacatctatttgacggatattacggaaagcgggacctatgaagacggctataaccgggttctcaatctggaaggaggaatttatacgaagctgcagttatggaatgttgcgggtaccgccggaggcgtcaccttgggagggaccaattcctttgtaatcaatatcggggcgggaacgtccctgctgaatacaaatcctcaattgatggggtggagcaatcaggaccggatcgtggctgccgacatcacgctcaatgtggaccagaatgcagggacgatcaatggattctgcctggtgggggatggcaacaagacggatgcgttccagacgacagggacatacattgtcaatatccatgggggggaatgggccggaacttcggttagctcgcctggcgccaggtggtgcatagggctggggcaggaatccttccgccatacgggagacgtcacattcaccattgacggcggaaccttcgcgcaactggtaacggccggaacgacacgtggtgcgggtcaaaaatcaaccattctcgggaacgttgccctgaatctggacggagggacttttaacggctccgtggcccttctgggaagaggcctcgtccagttgggagacggaacgaatgcgtatacggccaaattgagaattgcgggaggccagtataatgcgaatgtgtatggcttgtccgatgcgaccgcagcaggttccgcagcaaatattgcagccaattcgtccgcttccatggaaatcacgggaggatcctttgcgcaaagtttgtttgcgcagggagtgacgacgactatcacgggagctactttttccggagacagaaccaagaaaatttttgcgggcgcccgtttaagcacgtcagcctggagccttactgataccaatatgacgctggacctgggcagtggcacggtagcggccatgattgcggggggaagctgggtggaaaccggggaaagcacgttcaatatcacaggttccaccaacctgaccttcaagtccgggacgtatacaggccagatctggggcggttcctacattaatggaaccgctacggctgcccttaccggaaatattggttccaccaatatcacgattacagggggtacatttgacggagcgcaaatatccctgggcacgtatgtggaacgcaacaacaccagttccgcattgacgatcggggaagccaacctttccatcagcggaggcacgttcaacaatgccgccatttatgcgggcggccagaaggtcaacggcacttccctgaccacggcgctggccaacgtgaccattacgggtaatgacgccgtcttcaccgggacgacaactctttccggccaggggcgcggggatgtggtcaccaaaagcgtgctgaacctgaacggcgtgacgaaagcggacatgttcgccaacgcgaccgttaccgggtttgacgagatatccgccggagcgggcacggatgcaatcattgccaatgccacggttctggatgggcggagcgccttcaccaagagcggcacgggcaagcttacgctcagttcctccgccgggtttgcgaacgccctgacggtttccgggggagaactcagcttcgggctcgccggcggagtggccttcggcaattccatcacgatgggagccggggcccgtcttacctctgcgggtgatatggctctttccccggcttccggcctgacgctggacctgacggggctgaattcctccagcgcttccatcatccagtccggcggcacgctttccttcaattcggaaggtacgctgaccctgacgatcagcggggtggaccagacgatggaaaacgactacaagctgattacggcagacagcttcggcacgctgacggccagcaacttttcctttgatcccagcggtctttccggcgattacacttatgccctggaactgtccggaaacaccctttacctgcgcgtcaaggcgctgggtgaagccctcaactggaacggaggggccgcgggtacgtggacggcagcgggaggcgcagccatctggctggacaaggatgggacggcggtcgtttatgatgccgccaaatccgccaactttgaagacctggcaggcgtggccctctccgccgtcactattgacggggatgtttcctccgcccgccttacggtcaacaatggggaaacggcctatacgttcacgggcacgggagcccttgtagacggcgcgaatccgatgtccctcgttaaacggggggaaggggagatgaccattgaaaataccgggaccaatacgttctccggcggcacgaccatcatggccggcaccctcaacctgaatgccgtccagggcctgggcaccggcacggtgacgctgaacggaggggaactggtgctgaacacggcgggaacgacggaaggaacgctggggctggtagcgaccaacaagctcatttttgcaggtggcattttcacgtacggcacgggggccacgcaggatatttccggcctcattgacgccgccgccagtaccagggccatccaggtgaatacgaacggcaataatattgcgtgggccacctatacccaggaactggggaacaaggacatcgtcaagctcggggatggcctgctgaccgttaacacgaccctgggaggcaccttcaccggtgccatcaccgtcagcggcggcacgcttttctatgatatcggggccaacagcgccacccggacctggagcggaaacatctccatcgcgcaggatgccactcttcaaatcagggacaaccgcgcccatgccagcacaatgacggatacgctgtccggccgcatttccggggccggttccctggtgctggggcacaaggagggaggaggattccccggaggaggccgttattccatcagcggagacaacagcggttttacgggcacgttcaagctggtgggcaacggcaccaacgccgcgtggaatgaagtggcctttgcgaatgcggccgcctttggcagcgccagcctggagctggacggacgcggcttttttgtcagtgattccaccaattccgtcaatgccgacattcatgtgagggcggcgggaagctggctgaacggcaattccaaccagaccgtgacgttcgggggcgacttgacgagtgacgccggggccaacctgggaacgacggctgcaggcaacccgacgctgaccaccatcttcaccggaaacctcaccggttttgtgggaaccatgcactccgggcaggggaatgtggttcttgcctttggcaacggcggtgcggccgccacgctgggaacgggcgaattcatcaaggccgtttccatgggaggggccggaacctaccgcgtcaactacacaggcacgggcagtgacctgctttataccggcaatgtgattgatacggcggctctggacgtccagggcggcgacaaactggttcttaccggggcgaacacgtccacaggggaattgaagattgcccggaactcctccgtccagctgggcgacgggaccggggataacgccgcctgggccggaactgtcaccggagcggggagcctcaccgtcaacaccacgggtacctttgcggtgggagaccgcgccaatggcctgacgggaacgctcacgctggccaagggtacgctggacctttccgacgcggcggccactaccaacatcctcattcaatccggttcgctggcgaacgccgggaactatgcgggaacggctgcgaacaaggtccatgtcaatgcggttgccggttccggcaatatcgccctgggcggcctggatgccgccgggctgggaacggtcgtcaccgccactgccgggacgcagctcaccgggctcaagcagggttccacctggaccgtgaccggcacgggcagcagccttgcggtaggtgcggggaacatttccggagaccccttcacggggacggattccctgattcagtttgaaggcgcgggggacaacctgggcagcatctcctttggaaacggctccaccctcaccctggacctcaccagcgtcatggatgccatgaaaacggcgggcggcaatctggaaatcctgctgacgaacggcggctttgcgcaggaccttgaaacgctcaagggccacattgcggccaatccgctttttgccgcgctgggcttcggcattgtagacgtcaacgggggcagcatcgtcctctccggtgatacggacctggtttacgtctcctccgtggacggcacgggcagtgcggacaatccggttacgaaccagtccctcaacttctaccaggccgtgatcgtggaccaggacctttacgtccagtcggacggctccatggtgatcaagaacctgaccgcgccgggaaccaatccgggccagacgggaacgggcaacctcattgtcaccaacacggcggacaacaagggcagcatcgaattgcagaacaaccttttccatgaaggaacgggagtggacaccgtctttgccgggaacatcagcggcctggacggtgccgcggccaatacggacctggtcaagacgggagccaacaagctcaccctgtccgggaatgtgacgctggccggagacatcattgcggaacagggaacgcttcagcttaacggcacggccaatgtggaagccctgcgccttgattccacggacgcgggctcccttgcggtgatcggcgtgggaggccacacgacggcccagacgctggcgtccggcgccaacggcggaaagctggatatcggttcttccggaacattgacgctgacgggagctaccgatggcctttcccgcacggaaatcggcggaacaggtacgctgaacattgcggaaggcgcttccctgggactggcggcggacagcgcgctttccggcgtggtgctggacctggacggctccctgagcctggcggcggacggctctgccggtggcctgaacggcgccggagacctggagctgaacgggcagaccctgcatattcaggcggcttccggccaaacgcatacgtatgatggaacgctgggggccggaacactggatgtttccggcgcaggcacccaagtcctgcgcagctccggcgcggataccgatctgacggtcagcggaggaaacctggttctccagggcaaggcggatgtagacggcgcccatctcagctacggtaatctggtgaacaacggcaagctggccatccaggccagcgacaacgccctgacggcggtcaacaccaccctgagcgtggaaaacgccaccttcggcagcggttccaccaccaccttcaccctgaataccgatgccgacatgaccgccagcttcatcaaggcttccggagacattgtcattgaaaacggagccgccttccacgtcacgtcaattccgggcgtcaacatcacctggaaatcgggcaatccgatggaactcacgctgatggagctcaccggagccggaacgattgacctgggagaaaatacgctgacggtaggcggtcttttcctcacctattacaagaatgcccatctggtgcaggaaggggacaaggtcgttctgaaagcggaggaacaaacggacaatatttatgccggcgtcgctgacacggccaactccatggcgggcgccaatctgatttgggaagccgccaggcacggttccgtggaccaggccgttacggacttcctggccgccctcaatgacgacatggttaacaatccctccgccgccaggcgttccctggccgccgccgcgggcagcacggtcaccagcctgggcatcgcccagcgggacgccctgcgcgaccagatgaactggatacgcaaccgcaccaaccagatgggcgtgaaccccgcctacgtcaatgcggacctcccctacttccacatgtggatgcagggcacgggctcctatgccaagctggacaccaggggggatgaaagcggctaccagctcaccacctggggcggcaccgtgggcatggacgtggacctcagcgaccacttcaccatgggagcggctttcacggccaactacggcgacctgacggccagcgcggcggactctgcggacggtcatctggacagctactacgccaacctctttggccgctaccagaacaggcgctgggcgcacacattgattctgacgggggggtggaacgacgcgaagctcaaccgcacggtcaactacggagcgggcagctacggcacgcagggcaacaccaacgggtggggctttggagcgatgtatgaactgacctacgacgtgtacctcaatgaagacaggagcagcatcctgcagcccctggtcaacgcctcggtagtaaccacgagaatggacggctacacggaaacgggagccggcaacatgggcctgaacgtcgccaaacaggagttgacgacgggaacggttgcgctgggcggccggtggatgggccttgtaggcagcaacatcttcgggcgagaagcgctggctgagttccgggtgaacgcggcccaggacatgggagaccgccgcggagaagccaatgtggcgctgctgggcaaccccggcttcacgcagagagtcagaggagcgaaggtgggaatgacggcgctgcaaatcggagcagggctgagcgtgccggtaggaacgcagggaacgatcttcgtggacggcaatgccgacttccgggacggagcgaactcagtgaacggaagtatcggctaccggtatgacttctaaggagagttgaagtttgagagtggagagtggagcggagacgctctgctctcccggacccgcagggccgttccggcattgtccggaacggccctgttgcgtaaggagcgcggcttacagccgcgttttcgtttagttgccgcatcggcatgcggcgttccggcgtctgttgggaaaatacgggaagctccgttttcactcttccagcagccggcctccgtcatgccattctccaaacatcctgttttcccgggtattcttcaggaacttttccaggcggctatggaacagctccggctggtttttcttaatctggatggtatccaggcgcacgtggcggtacaggcggggaaaggccaggaagttggaataaacgcgcgggtccttctgaagggcttctaaaatatccggatcaatccggaacgcctccgggtccatttccggcaggcatttttctccatggggggtcatcagccccagcctggtcaggcggcgtacgcgttccttgttcagctcggaccatttgcttttcctggaacgtggggtgaggcgctgggccagaaaaccggaggctgtcttcttgcgggtgctgtcaatccagccgaagcacagggcttcttccacggcgtccaggtaaggaatggcatggggggaaggctttctcgtcgtgagaacccagcagcaggaggaggaacggtggttctgttccagccacgttcttaattcctgccgtgtggtgatggggagaaggtggtctatttccatggcggttcggtgaatgccgcttctttctgcggcagcgcgcaaaaagagaaggtgcgcaggccgtttttacgaaagggccttccgttgatgcgccgcgtgtcgggatggagcggcttacggggtgaggataccttcccggaggctgcatttccagtacaggcatgtttttctattccatggcatatttcccggcagggggcctgcccttcctccaagtccgggaatcccttcacggcgtctttttttctttctgcggacatcctttcccctcttttgcgtaaggaagggccggagacggtcctgcgcatgatggagtacggcacctgtccatcctttccccggaagaacggggaactggccttccatgccggcgtcttttcaccggaaaggttattgttcccggagtggaggggcaggccgttcccgacgttcttttcacttccggcaaagggcggcgggttttgtccttgtcaaaacgaatgccgccattatacatgatttatgaagaaaagcgtgttgctggccgggctgggattggttctgctggcctccgtggtggtgactcttaaaatggcgtgtgccgaggattccgtcaaccgtgccgataccgcgcgggaacgggtaacgcccgtgctgaattccttcctgggcctctgcggggccaaagtgggggatcctgtattcctgcgtgccgtgaaggaagactccgtgctggaactgtgggtgaagccggataaggcggaacgctacgtgcttgccaagcgttaccccattgccgcgtggtccggaaagctggggcccaaggaaaaggagggggacaagcagaccccggagggtttttacgaagtggagccgtccggcctgaatccccgcagcaactaccatctggctttcaacatcggctatccgaatgcctatgaccgctccctgaaccggacgggaagcttcatcatggtgcatggccgggacgtttccattggctgcctggcgatgaccgatccggggattgaggaaatttacaccatggtggaacaggccctgattcatgggcagcagcgcgttcccgtgcagatttatcccttcgtgcccactccggcgcgtttattgaaggaaaagaattccccccacgccgctttttgggcggacatggcacgcgcgtgggactggacggaacggacccacaccccggcccgggtgaatgccgtggatggcaggctggtggttgtggaacaataaaaatcctccggccgggggccggaggatgggaaaggtgcggaaggaaaggggaacggttgcccctgttgccgcgcgtccgggaaagacgtgccggaacgctctagacgagctgggcaatcaactcttcgcggtcgcccggcaggaagtccatcggggcgatttccggcagcgtgtagcagccggaggccagtttcatgctggctcgggcgcaagccaccatgacctgggcggtcagggccggattattgatgcgcatttcaaacgtgaacatctggttctgcgtggagccggaaacgcccttgcgttccatcagcacgccgtggcccatgtccttcagcgcgtcgatgtcgggcacctgctgcacgcgggtgtcgtcatggctgaaataggaatcggacttgatggcgaactccacgtcggagaacttggctccttccttcagcaccacgtaaaccatgcggcggtgcacgccggaaccggtggggatggtgagggaaagggcgtccgccactccttccttggagcgggcgactacgctgtggcccatgctcatgccggggccgaagttggtgtacgtaatgcctttgggagccatcgccagcatcagggtgcggatgacggagtccgtgcccgggtcccagccggcggagatgatggagacggcgtcatgcttgatcgcctgtgctcccagggagcgccgcaggttcacgatgtccccgtggatgtcaaagctgtccaccgtgttgatgccgcgggcgagcaggggcagagccgtttcttccacgctgcgggtgggggtgcagagcagggccgcgtccacatggcccaggtcctccatgctgcttgcggtcttgatgccgtgcacgggttcgctgccggggcggcggacgatgcccgccagttccatatcgggcgcggcgcgcaaggcgtccacggcgtatttcccgatgttgccgtatcctacaatggctactttgatcatcttggtagtaaatagtaatgattccgggagcggggacggaatgtcctccggatgttttctcccgttgacgcatgttttttaagcgttgcgggtgcgcatggcaagaacggagaatgacaggagcgcctgtgcggcatcatgaagggttctttgaacggagtccggagaaatggagtctgaccactcggaactcttccaataaaacgatgaaaagcaaattgattattctgagtatcgccacccttcttgggtgtgtttcctgccatacgatcggcggagtaggcaaggacgtggaagccgtcggcagtgacattaattccgccgcccgctccaccagccgttccatgtaaaaagactgtgtgtgaccatggacgaaaaccgcttcatccggatggatgaagcggttttctttgatgggcgtgacgccttctttccagcctccggttttccggccccacggaatgttcccgctccctgtgaaaaaggtttttttacgatgtgtgacgggagcaataaaaagggcatgccgtatgcccggcatgccctttgaaaagaaattaaccttccgtttttaacggcggcggcgcagcatcagggccgccaggcccagaaggctcagggagacagtggccggttccggcacgccgttgatgtaggagacgtaaatcttgccgttctccgtgaacacctggtacttgcctacgttttcagcggtcagttcctcggcggcgatgtcgtcgctctgcgttccgcccgtgatggtcgtgttgctggttgcggcgcttcccactccgttgacgagttcacgcgtcacgagctcaaatgtagttccttccgtaatcaggtcgcccagggaggcggagaaggcgaaacggcccagatcggtctggttcgtaagattcaggatgccggtcgtgcccaggtccacgaacaaattgttgctgttggcgttccaggtaagcgcggcagtgaggttcagcgtgccgtataccgtccagttcatgttctggtcgcagttggctacgatggaaccgctcgttttgccgacggtcagcgtggagccttcacccacggagacggtcgtgcgctggaatttggtgaaattctgaagggacacattggctccgttggaaacattgatggtggaggtccatccttccacggtggtgccgggtccgcataccacggtatggttgccggatacgttgaccgtgccccagttgggattgaccagcggaacatcggcgctggcgccgctttccgtctgccagttggatgcctggctccagtcggtagaaccgtcaatgggagcccatgtataaatagcggcctgcgccgtcatgcaggaaaaagccagcagggaggaaagcaggatcagagttttcttcatatgaatgcgatgtgaattagagcttgaaagggaaacttccaagcccgcgggaatatgccggattacaaatccggggtcaagggccgattttcatatcaaggaacttatgctgcctgaccgttgcactatgggagaccgtttccgtgtaggaagccttccggaatgaggaagccggcccctggaacgccgcaagcctttgcggccgttgaaatatacgtgtcctgctaggacgcactgattttcagggaaaaggattcgctgccgctcgggttgaatacggatgacccaaggacttgcggcgcttcataaggcatcgggaccattccatgttaatctgtaacggatttgtaatccgcgggcggcagagcactccatggggaaccgccatccatgaaacgatgggggaaactttaaatctttgcctcttttgaattaaaaagaggctccaggctggtggccggatgcttcttccgctttactgcatggactccctggtggcctgggaggcgttgtcaattttgctgcccatggcttccacgtcttttccgattccgctgatggtgttgcaggaggcaaggccgagggcggcggcgagcgtcagaagggcgagtttggtattcatcggtggaagagaggttgaaagccgcatcctaccctgcttccggttccttgtcaatgagccgaatgcttgccggaacgcctctttttccgggcatggggctttccggcggggaagaaagtggctgtgccgagcccggattcggaagttatgtaaaaaatcttcgccggggacctggcggcgggttattgatgaaggccgcggggccttcattcacgggggaatcgctgcgtggacggctgccgggagaagggggttttttccccttggctagatttctccctccggaccgcctggagaacggcgcagtttccttttcagcgccagccccgtgcggaccaggaagtaaatggccgcggcggccagcagaacggccgcgacgggaagaacgcaggccagcacggcgacgatagaggcggaagccgtttccgccgtggtgacgacggagttgcccagtccgcccgtagcggcggaggccgctccccggatggcggccatgcctccgtggatgatgcctgccgctccgcctccggcaatggcggccagcccccatttaagcatggggtccatgctgccgatgaagccggcggccaggatggttcccgcaacgatggcggcgggagctcccagcacgtccagcgtgtggtcgatgaccgggatgtagtacgccgctatttccagcagcgtggctacggagagggtgaccagcgcggccgtgccgcccagccatgcgaattccggcgtcaccgtcaggaagcctccccggatggcgatggcggctaccagcagaggcacaaagatgcggaagccgcaggccgctcccagcccgatgccgagcaaaacgcccatgacggcttccatattcatctgcggatcagttcagtttaacggtggttgcagtcgtggccgcctgggtggcggctgcgggagcggctgcggcaggggcctttttctcttccgtggattttcccaggaaggagggcagttccagccccacgctcttgccgagctcgtggagaggcagggtgtctttcaccagattctgcacgaatccgcccacggaggaatcccctccgttgcccatgacgactaccttgtcaaatttcaggcccttgatggcgccggactggagttccacgatcttggtgagctgttcggtaatcaggaggctggaagcggcgtcggacgagcctgccgcctgtacgatctgctggaagccgcgggccttgccttccagtacggcttcaatggcggcggcttcaccgcggcccaccatttccatgccttccccttccgcctttttcttcagaagggtggcctgggcttcgccttccgccagttgccggatggcttccgcttccgccctgcgctggatgagcagggcctgcgccttgccttcctgttccagcttgagcacttccgccgtggcctgggcctgcacttcgcgctggctcttttcaatgcgggccgtcaccaggatgttggcctcctgcgtggcgcgttcgcgttcggcgcgctttatttccgcttccttttccgcctcgtaggcttcttccagggtcttggcttcctgcaccttctgggccacttccgccagcttcttggcttccgcctgcttcacttgcagcttggcggcggattccgcaatcttgatctgggcttcgttctggccctcaatggcaatggcgcgggcgttcgccacctggacggtctggtccttttccgcttccgccttgccgatttccccgcggcgcgtttcttccgccaccttgatggtggcgtcattgatggcgcgcgcggctgcttccttgcccagggcgctgatgtagccggaggcgtcctgaatgtccgtgatattggcgttaatgaggtggaggcccaccttgtgcagctccacgtccacgccttccgtaatgcccttgatgagtttttcgcggtcggagttgatttcctcaatggtcatggaggcgatcaccacgcgcatctggcccatgatgatttccgcagccaggttgcggatttcctcccgggagcggcccagcaggcgtgcggcggcgttctgcatgatttccggcagggtggagatgcccacgatgaaggaggaggggacgtccacgcggatgttctgggaggagagggcgccctggaggggcacgtcaatgttgatggggttcaggtccaggtagctgtaggactggaggaccggaagcacgaaggtggaaccgccgtggtagcatttggcgggctggcccgtgcccaccttgccgaagacgatgaggattttgtccggcgggcacatgcggtagcggctgaacagccaggaggccgtcaggatgatgaagagaaccagaatggcgatagggatgatttggtccatggtattggatggggtgtatggttgggtttattggttaatgaagaggtttgacggtgacgacgcctgccgtgacggcgactacttccaccggggttcctgcgggcagggattcctccccttcctgaacggcggggaggtacagaagctggctgggatgggcgatcgtcacctgtccgccgcgttcaagcctgccgggaatgctgatgtaaacggtgccgtgcatgcccttgagggtttcatagttcagggtgccgtctgatttgaggctcatgatgaagcgcatggaaaggccgatgatcaggaacatcagcacgccggtgaagaaggccgatgccagggaggcggccattccccagcccaggccctgggcgagcacgccgccccagccgaagcccaggaagaagccgatgccggatttaatggacagcaggcccacgtccgcgccgccggcgtccgcgtcaaagtccaggtcatgttcccccagcccgaacagggacaggagaaacagaagcgctcccacgcccgtcgcggccacggcgatgatgaagaaaatggagtaatcagtcatagggtagattgattgccgggagtatccatgtttggagcccgcttgtctatggaaaaaggaacggcggccggatattccggcctatttcatttccaccacggctttttcccccttcttgagctccagttcccggagcaggaggaagtcgttggtcagcaggccggccttctccacgggagtggcggtttctccaatggtgacggtggcctttttagcggtgatcctgttggggaaccagacgcccaggcgcgccttggcgtccttgttggccgtgacggtgaagcccttggcggcgtccgcggggtcgttccactcaatatgccacggggacggagcgcgggattcgtccaggcgcgccgtccaggcgggatccccgtaaaaagccacggtatcccggtcatggatgaggcccatctggtccttgcccatgccgtagccggcggagttcatgcccttggcaaagtccgggtcgtccttgatgccgttgatgtccggcgcgttaaagttgacgttcatgagcttggggaagcgggtcatggtttcgtccagaatgaactggttgttcaggtaccaggcttccgccaggctggaggcgtcatggttgctgaacaggagtcccagcgttccccagccgcccttgccgtaccaggaggggacggtgtagcccaccagctggttgaagccgtagtggctcagggcggtgacggccatggaattcttcgtttttttagtgtcccctaccaggcagttccccgcggctacccagacagcaggaaccggcttgatttcaatctccggagccttgattctctcaaggaaggagagcaggtcgtcctccttcccgttgaagatcgcaccgcgcaggaaggtggtgaattccttgaactgctttttgtccagcacgtggaaccggttgttgccggagacgatgatccccttgccgaaaggcatttccagattgaactgggtggcgtgggaggccgtcacaaagagctggggagcgtaaagttcccagtattccacgagcttgggcgtcacgcccagcgtggtttcatccccgcggtcctgttccttcaggccctttacgtaaaaagcgggcgttaccttgcccttggaattgtgctgttccaggtactggaagggctgccagtccgtgatgctcatgctgtcggtgaaacgggaggcgtccacgttggtggttcccatggagcggctgatcacgagcggctgcgtttcagaggctatcctcatggcgtcctgcggggtgtagcccgtgacgatgccccagatgcagtccccgtacgggtcgtcgtccaggcggcgggtcaggcggtggaggtcattgaccagcacccggtctatttcctccgggcgcgcgaccacggccatgaagcggggggccattttcttgagcgtgtccagcttggcgaacatggagtccttcacggtgacgatggagcctccgtgcttttcagccagcttgtccgccacggccttccattccggcatggcggcggtttcctcggagatgatgatggcgtagtcattcttgccggagtctttttttatggttttcacggcagtggcgtgaatgcaaaaagccgccgtggagacggcggcctgggtggcatcgggtttatccgcctgcttttcagcaggcggagcttccgcggccggatggtccggcaggatgttcaggttgagatgttctcccttgccgaagatgtctttggcaagcttgttgacctcttccacggtgatggctttcacgtccggaatgctttccctctgctgggccagccgttccggtttggcctgggaatccctcagcacggaggtccagtagccgttgtcgcgctgggcgcggtccatggagttgagaatggggttgcgggcgcggtccagttcctcctgggtgacgttccccttgccgaggtcgtccgcaatcctggcaatcgcattccgcacggcatccttgttgcgcatcacgccggagctgagggtgatgatgtagccgtcgtccgggtaggtttcactgatgttgagcccggtggagggggagtaggtttcccccatgtcttcgcgcaggcccttgaacacgcggtcatagaagacggccttgagcatgttcagcctgcgggccagcttcttgtcttctccgccgggcgttttccagaagaggcagaccagcgtcttgtcaatggaggaatcataggtcaggtccttggagaagttgaagtccgccatggcagggtggcgcagtttttcatccagcttcgcaggggcgtccgcacgtttgggcaccgcgcctacggtgcgttccagcaggggaatgatgtcttccgtcttgaagtcccccgtgacggtcacttccatgtaattgttcttcaggggggcgtccacccagtcctgcacgtccttgacctcataggaagccagttgttcctgcgcggggaaggtgaagcggggattgttcttgtacaggatggcgggcacctgcatcttcatggctccctgaacctcatggttcagcttgttgtaaagcatggggatggcgcggcggagcagggtgacgccgtcctggcggtagccggggtacatcaggtaggccgtctggagctggagctgcgtttccaggtcttccttgctggtatttccggagagcaggaaggagcggtccgtcatggagaagcccacgccgactttcttgcctgccatgatggcggccagttcgtcgttggagtggtccttcaagccgccgccgttcatcacggcgcccgcaaagagttccagcccggaggctttttccggcctgctcagttccccgccgtccacggcaaaggtgatgttgatggaatccttgtcgaactccgtgggcttcaggttgacgcgcacgccgttggaaagggtgagctgggtgactcccaggtcagcggcttccgcgcgggccgccaccttgccgggttccccgaatttgtaggagaagtccttccggctgtccgcctggtagggctccaccttggaggcccgggcgtcctggtacgtcttcatgatttcagcgcttccctgggcgttttccttgttggaggtgacgatcacgcgggggaaggctccggtccaggcttccttcagagcggcctggcattgttcgggcgtcaggttttccacgacttccctggagatggcccagtcttcctgcggcgtggtgaagaccttgtcctgcgcggcgctctgggcgatggcggaggccacgtcttccgacttgacggtgggccaggatttgatggcgttttccgcggcggcagtgatgttgctgcgggcttccgccagttcctccttgttgaagccgaattcgatggcccggcgcagctcctgttcaatggcggtcagggccggcttccagttcttgtagtccgcctgggtctggatggcgtccacttgcgccgcttccatcacgtccatgcgtccgccttccgcggaaatgaaggggcagtccgcattcttcgccatcttttccagacggcggttcagcatggcgtaagccacgttgaggggaatgtcctcgttgcggttggcgaccgtgtccggcttcttcacgtagggacgggcgatgttgacactgacttccgtgctggtggcctccttgttggtgatccagtgggcggtggtttccgtggccgtcttgagcgcgccccggtccgtctggaaggagtaattgtccttcttcatggagccgaagtatttttccacccaggccttgccctgttccggcgtgatgtccccggcgatgacgagctgcatctggctggggacgtaatgggtctgatagtagtttacaaatttttcccgcggcgcggtacggattacttccagcgtgccgatggggtagcggtcgggaatcctggtgccgtcaagcatgatggagaagacctccttcatgacccggtagccggcggaatcccgcgccttgtattcactggtgatgatgccgcgttccgcgtcaatggcgctttcctccagcagggctccgtccgcaaaatccctcatgatggtgaaggccaggttcacggtggactcctttatgctgggcacgtccatcatgtacacggtttcgtcaaaggcggtgtaggcgttcgcgtccccgcccaggcccaggccttccttctgcatggcgggaatcatttccccgcgcttgaaatgcgtgcttccgttgaaaaccatgtgttccaggaagtgggagatgccctggatgtcgtccgtttcattcagggaacccgtgttgacgcgcaggcggatgctgaaccggcccttgggctccgcgttcgggcggatgaagtaggtcagcccgttggggagctttcccttgataagccggggatcctgcttgggaatgcctgccgccggttggacagcggcggcctgggccttgttttctgctgcggcttcggccagcgaatgggccgggagtaggcacgcggcagccagaatggaggtgatggtaaatgccttcatggaaaaatactgccctcttgtttcacacgattttccgggcaagtcaagcggccttctctgcataaaagcggtgaatttccggagaacctccggaaacggaagccatatcaaaaggatgaggaaggcatccattcatcccgcgggcgcggctctgaaattccgcagatgcggtccacgcagcgctcccacgcctcccggccctggtagatctccacctcaatgcgcaggaagtaaatgggaacctccgggtcttcctccggtttttccagccgcacggcgtccttctccgtggtcacgatcatgtccatggcccggtccgcgcagcggtcgtagaactcctgcaattccgcttgttcaaaccagtggtggtccgggaacctgcggcagatttccacgtgggcgcccagggagcgcagggaatcctcaaagctttccgggcgcgcgatgccgctgaggcacgccacccatttcccctggagggcctccaggggaagccgttcccccgtgaacacgttttccaggtaccgggggccgtggtcgctcacgatgatgtccgccacgggattgtacttcctgatggcggcgatcagctcatcctggggcttgccgccgcatttggtcagaacgatgtagctggcgcgcgccaggctgcccctgggctcacgcagggtgccgcgcgggagcatggccccggtgccgaagggcgcgccgcagtccaccagcacgatgtccagttcatgagccagtttcaggtactgcatgccgtcgtccagcagcagggtgtcgcaccccaggtgttcaatggcgaagatgccggacttgatgcggttcttgtccaccagaaccgccacgccgtccaggttcttggcaagcatgaagggttcgtccccggaatgcagggggcccaggtagcgcgtttccccgtcgctggcgatcttgggcaggttttccggctggcggccgtccttgtccttccactcctggggcttgtctaggtccgcgcttttgtagccgcgggtcaggatggctaccttgcggccgcgctgggtgagggtgcgggccagcagttccaccaccggagtctttccggtgccccccacggtgatgttccccacgctgaccaccagcgttcccagcctggcctgcttcgcgatgctggagtggaacaggtacagccgcgccagcaccaccagcctgaacagccaggaggccccgcgcaggaccatgcgcatcatggaggcgcggaaccccttggcccgaccgaagatgacttccgtcccccactcttcaaactcttccgatctggatttcatgataagcccggcggcgcgcctggaaactccgtcagtggaggatgcggtggcagctgtcgcagtaaacggtttcgtggccgcccagcaccttcatgcgggcgttgtccgtaatgaccatgtggcagccgccgcagtggcctttttcatccatcggcacaatgaccgggactcccttgcttttggtcatccgttcgtattcccccagggaatcctccggaacggcggcggccaggtccgcgcgttccgcattcaagtggtccagaagctccttgtccgtttccgccgtccggtcaaagcgggccagcgtttcctccatctcgcgctgggcgtcccgcgcgcgccggattttctgctccatatccgttttcgcggtttccaggcgttccatcagctccagctcggaggtttccagggcgtcaatggcggcttccgtcttctccacctcctgaatgcacatctggtattcctcgtttttccgggtgttggactggagggttttcatcttgccgatgtaggcgcgcttggtttcaacggcggcttccacgtcccgtatgctcttctcaacgctcgcgacttcctgcttggcggccagggccttctgcttgatggcctccatctggcgcaggaggcgcgttctctgttccggcagggaggccagctccttccggagtttggagatccgcacatctttttcctgaaggatcagcaactggtctaaatcggcatgattcatcgcttgctaccttagcatgccccggcgggacgggaaagattttttctcggccccggggcggcggcccttccgtctttttacggtactggggagcggcctcccgtgtttcgggggaaaggaggttttcctgagaaacggcctcccgtttcccgctgagtatttcaagcagggccttctgctgcgccggagtgccgccctgtgcgggcggcggcatggaaagttccgcatactgccgcgcaagtttgtctttcttctgccggttctgccagaaaaggaaggcgcacacggcaagcacgcaggcgcaggcggctgccaggaccgtgtatgaatggcggttggagggcatgacgggagagactagccgtgcattgtagagaaagacgctcccctgttccaggtaaatcaacaacgggcaaaagaaagtctgccgtgccgccatgggggcggaagccttccgcggctgttccggcggctcttaaaacgtcaggatggtttggagccggaagacgctggcgtttccggtgtcgtcccggcccgcggggttggaaatccacagcagggagggctggatcaggaaccagggagtcacggaaatgttatagtggcattccatcaccacttcctttttgcttctggaacggccttccgccatgctcccgtcgtccgggcgggtcacggccagggcaatgccgaactggttggcttccccttcctcgcagacgcccaggtgctggagaggctggctgcaaacgaagccgccggaccattggacggcggcgccgcagaagttgtcccgcgtggaatcgctccagcccgcgcggcagaaggccttccacgggctgccgccaagctgctgctccacgttcagggcgatgccggccacggtgtggaggttcttcctttcctccccgtccggcagttcgttgatgcgggccatgaagggggtgagcttgacggcgccggaatcatgcacccacgccagttccgccaggatgttgaaattcttgccgtccgtgtgtttcagcggggaggcgttctgggggcagctggtgaagttgccgcccagcatggcgtaccactgctcgtggaactggtgctggaagatgacgcccaagttggaatccgccatgggaatcacctggttgttgacgaagggggaggcgcagaactggccgaaggaggaattggcgtagctgttggtgtcaaaataattcgtctggttcaccacgcccgcgattatggcgctttttccccggttgaaggtttgcaggagcgctatttccggcaggaagaagattctttccccgaagatgtccgtatgcgtgtctcccgtcaggccgatggcgtcattcatgttgccgcccctccacgtctttccggtcagcgcagtggagcctgaaagctccagtttcagccacgtttcccggttgctgggcgcctggatgaggcggtaattggcgtgtgcgtgcagcaggtaccagagctgggtgccgggcttgtccggagccgggtggtggatggagttgtaggaaaaggcgttttccaccaggaattccagtcccgcgcggtgcgctttggagtggaggccggtcagggcctgcgtaagggaatcgttggggatgggggccgtctcgtccccgtaatccccgcccagcaaattgatgtccgccagcaggtgggccggaggttccggctggtccgggcggagcatttcggttcctgcctgtctgccctgggcggcgaaggctcccagaaggccgaggatgatgaggggacggtacatgttgtcaggtgaataggtaagtggtgcagggggcggaggggccctatcctaagggatggggcaggaggaggaaaagcggcaaatcacccccgttgagtcatgacgcagccggcggggcatttctgccgtggaaggtccggttcagggggaaatgccggaagcgcgccggaaagacggggccggttaaaagcccagggcttccttctgccagttcagcagggtggagacgcctttttccctgtcttccgcaatggcttccagggaggcccgggtaatcaggaaggagccttccatgcccagttcttcagccttttcatccctgagcttggacaggcgcgccagattggcctcaaactggtcggaatgctggcggcgctggatgcgcgggcggcagggatagtcgtcttcatccagcaggtaaaatttctggagggcgtccatgaaccggctgcgcctgtgggagtggaagcggggcggaggagtcacggtgcgctgttcctgaagggcgaggctccactggatgaggtccgcgttggagcagaccatgaacgcgggcttgtcccacgctttagcctccgcatcgcgccatgtccacagttcccggagggcggccagccctttcctgttcagcttgccgcagccctggatgcgccaggggtcctgatggccggccagatggcgttcccgggctcggtccatggagtgcctgcaaatctcttcaaaccagcccatgcgtcctttttcccggagggcggccgtcagtttgtccgccatgtccagcatgtaattcacgtcgttcagggcataggtgaccatggtcggggaaagggggcgccgcgcccagtccgccttttgggaggacttgctcagggctacgccgtggaaatgttccaccagggcggccagcccgaactggcggaagcccagcaggcgcgccgccgtctgggtatcccagatcatggcgggcagcgtttcccaggcgttctggaagaggctcatgtcataatccgccccgtgcatccagacttccgtttccttcagccagttgtaaaacggccccatgtcttcaatggagagagggtcgatcaggcaggagcccgtttcatccgcgtactggatcaggcagatcttttcctgatagcggtgcaggctgtctgcctccaggtccaggactacccgtcccgtgggctgtgcggtggcgcgcttgcgccattccagtaattcctctttctcgctaatcatcttattgcaacagagcgggattgaaccatgtatcagcacgccgggcaactggaaatgcaaaaaaagtgctgatggggcaatcatgtattgcctatttcccggaaatagggcacgaagaaaggcgcatggaagaggaagctacagaaaccggacgcaaccacggagaacagcctttggacgaattgatgaagcgctggcatctgaccaaccacgacctggtggagatttccccggaacagcttacccacaagcaggttcaaaaggcccggcagggacgccagcttaccttgaaaatgatgcagaaggtgtgccgcgccttgaacgtggccatctgggagcggcttacccccatgcagaaggagcagtattttgaatacatgcacaagcatgtgttcagctatgccaaggggtatgacccggcctggaaggatccgaacatggacatgatggcctgattccggacctcttttccgccgcggaggcacgcgttcccttttccgtttcttgtttcgcgcttccgggagaaaccgggctgcggcagggaatttttttacaaggctggcggtttttatgaagcgtcctgatgccccgttttttcccgtttttacgggagatgggcagatcgtcccgggtatggtattgtgttccagcgggatggaaaaaaacagacattccatttgacagccagaaaaccagggtgtatacgccgcgctcctttttatccgtcatcatgatgaatattgcttttattacctgtttcgtcggtgttctggggatgtgtgcgggagcgtccctggccgagggcaagccgtggtccggagaaaaagttccgctggcggaggacggcgcggtggttctggatgacaatgaatacctgctgaacctggcggattatgaaaaactggagcagggaggcggtttgctggtgcggtatgcagccggaaagaacgggctccgggaagactccggcgcgttctattttgaaaacagccatggaaaaatggtgagcgccgccatggagccggtatccggaaatgccggaaaaacggaaccggagcgtctggccctggtcagtcccgctttcccgctgaatccggaaggtaagtggagcctcaagcggaagagcaggccagccgaactttaccggaagaaggtggccgtctcccacatggaccaggaatacacgttccagagccacgaagatgcgcaggtgaaactggtgcacggcgtgctggcaaatgccctggtatcgggaaataaccgctccaagagttataactctttcaaggtaagccgtcataccccccccccccccccttctttctgactcgctgaaggaaaattccggttcttcagacggggagaaagaggcaagggaggaggacggacaggcggaaagccatggggaccgggagaagccggaatccgggctgcatcttgcagagaacgccgttgcggtttccggccccggcagccttgccgcggctccgcgtgcggcgcaggacatcaccgtgaccgggggtggaagcgttgtcctggaggaaggatttgacggaacggtgcggatggagggttccggagatattttcctggacagtgtcaatgtcagcgacggcggcaacaaggaaaagcattacggcctgaatatccggatggacggcggccccggctccaaggtgtatctgggcttcacgagctctacggcgcgcacggcttttttagagggtaccgtttccggtacggggacgctggtgtttgagaacaccagccgcagccgggtaagcaattttgacctgacgggcgcggacatgggcggtttcagcggcgtggtccaggcggcggcgccgcgttccagcctctcctccgaggggtataatacgcccgtccagcttcaggcggcggggaatatgaacgccacggtcatggacctgtccgtgatccgccagggcggcaaggaccccgccgggctgggaggctggctgacggacagtgcagggaccccctccatggtgatcctgaagctggagggtgatttgaccgtctccggcctggaaggggccacggccggttcctcctctcgcgtgacggtgggcaatgggactgccgctaccctgaccattgacggtgcggagaaccatgaattcaagggaatgatcggcgcggcgggcgcggacggcggctactacgtggggacggagaagaatgagagctacaagaatacccagcttgtggaggcggacggcaccggagtcatcaatctggtcaagaagggaagcggggagcaaaccgtttattctggccggctgggcagtctggacattcagggcggcgttttccgcctgggggcggatggggccctgaccgtagggaattccttttccacttcctccggcggcttgctggacattgcggcaggggccatcctcgcgctggattaccatgaagcggcttcccggctggggggaatgaactggcggtccgccggaacgcttgtcttcaacaaggggctggttctggatgtggacggaacgtttcaactggattcttccgtgcaatttgcggagggcagcctgctgacggtaatcatgcccgcatccggcattcaatccggagaatcccgcaagctggtttccgtgacggaggggaataccctcttctttgcggacgccgtgcagcgggaaaaggtcaggtacgccacgggcagggatgccgacggcagctggatttaccgggagctggacgtttacagcggactgaccctgaatgtgcaggggggaggccaatggcagatgctcgtgaccgggctggattccacttccctggaaggcacctattttgacgcggacaagttcaattactacgtctggcaggggaacgggtccaaggttccggacggcagcgtgtggtccgacggggcggcgggcgccagcccgtgggaaggcggcctgacgttccgcaacggggagcgtgaagtcttcttcggcatgcaggatttatccggccacgccgtggacggctttgacgtcatccttgacggaacggtgcgcgtctccagcctgacggtctccgtggacaaggaggcgaacggcggcatgggctatgtcttccacgccgcggacggcggcgcaggcagcattgcggacgccggaccggaccacgcgggcgagctggtcaaggagggcgcaggcatgcttaccctggctaccggcaatactttttccggcggaacggaaatccgtgagggcagtattctggccgcccgtgaaggagccctgggcgccggggacatccgcatggcggacggaacggaactgtatgtcaactacccctttgccacggagctggattcctcttaccgcaacccctccattgccaacaacatccggatcgggacgtcctccaaggacacggcgaaggtggtcatcggctactcccccctttccctggcggagaaggaagacctgcccggcgcaggttcctccggctaccagtgggattacctgacttcccgccactggcgcacgctgtccctgaccggcaggctggacggctatggggaactgacgctgatgggctatacctccacgacggcgggcggccaggacaagtgggtaagcatgttccacatctgcgatgaaagcctggccccgggggaaaagtccaattttaccggcacggtcaagctggacaactacattctgtattccgaggcggactcccccgccaatgcggatgccaacaacgacatcctggccatccggaagcccggcgccgtacagctcatcgtggaagacgatgcgctgcggaacgccaaggtggacctgacgcgcgcccataccgtgaacgcggcggacaacggcaccgtttttgaaggaaaggaacgcatggacctttaccacatcctgctggtgcagaaggatgccgttctggcggggctgcaaggggatttgatcgggaaaacgcaggacagcgagtattacggcaagacttacacggtggggagcgaagtggatacgctgcgcgtgctgaccaactccaacagtacgctgacgctggatgtggatggtacggaaaaactgtattttgccggtgtcttcgggacggcatccacgtatggttccgctacctccggcaaggtgacggccgcaagcagggaaaccctttccctgaccaagacgggcacgggagcacagtacatccatacggccgcggtcaaccgcctggtgctccaggaggggacgctgggcttcaacagcctcaacgtgaaaacgagcgccgtcctgtacggaggaaccaacttgaatctgggagtgacgcggggcatcgcctccgacggcacggcgcaggagtggggcgcagcggggggaggcatgaccatcaatcccggttatgcgctccacatcgtgacggacaggaccgtaaacgccggtacgggggcaggggtcgttgcggttcctgaaacggcggtggtgaacggttccgtgacggtatctgattcctccttcctgtattttgactgctccatcctgccctccgagctgcaggagcatcccctgctggccgtcaaggggctggaggacatcgctgattccggcaggttgaacctgaacggcgatattctggtgcgtttcgggggatacgattttggagaagcggacacggttgacaaaaaatactacctggcgacgacggaaagcggcatttacgtggacggggcgctgggcggctttcaaacccgcacgatttccatcgggaacgggtggttcggcatcatcaaggtttccggggacaacatgaacctggtcatgacggtgaccaatacgcccatccgcacctggtacaacggagaaaaccggagcgagggggaatacgtggccgccacggacaacgtctggtttgccaatgaattgcccgaaggggaggggaccgaccgcaaccactggctggagggcctggacaaaaatctgggccttaacggcttttaccgggatacctaccatgtggccttcggcgcggaaggagccgggaaaacaggaatggtggaaagggaggaaggaaaggattacaacgtggtgctcatcaggggggaagtgcgccccgcctccatccgcgtgaaggatgacgtcaactacatcttccgcgcccatgcggacgggggcctgattgcggacggggagcttccggatgactatgaaaccagcaactggaaaaccattctgaccaaggacggagccggaaccctggtgatggagacggccaacacgtattccggcggaacggaaatcaacggcggcagggtagtcatgagggatgccggagccctggggaccggggaaatccggatgtttgacggcacctccctggcgctggactaccagagcgggggctttatccagaaggtggctctgctgaataacctgctgacggtggcggaggattccgtggtgacggtgtcccatacggacagggtgatcggtggcgtcatttccacggtccggggggattccaccgccaaccttgtcctgcagcatgccaacggcagcggccagaccgttttccagctggatgacggctccaaattccatggaaagatcagcatgagcgggacgcaggacggccagggaacggtgcaggcctgtctggaccggaacacgtgggaagaagccggttttgatttaagcctgaatggtgtacagagcacgatactgcatcttgattccgtggaggacgtccatcacatcaccctggccggcatcatggggcaggatgaggcttccttcgtgaccacggaagccagcgcggggcgcgattcctccaccacccttttcctggcggtggggacgcaggaccggatttattgcggcaatgtgggctttgggcagtacatcgacatgtatgatacgggcctgcgccatgattccggctacatcagcctggtgaagacgggcatcttttcccagacggtggggaatgcgcgcctggcttccctgcaaattgacgcgggttccctcaaggtggtaaacactcttctgctggccggggaattgagcgtggcgcaggatggcaacctggtggtgggccatgacgaatggcaggggctgtacgattatgacgtgcaggtcaacgacggcggcgttctgcgcctgggctccggctttggttccctgaccgggactccctacacggaagacggagttcagaaaaccggcaatacgattcttctgaacggcggaggcgtgctgggcatgctggacgcggactggagcaatgagaatgaaatggtggtgaacgccggagggaaggcctttgtgctggatacgacgggttacgatccggactccatgacggcctccggaaacagccatgtcatgacgctcaacggaaccgtcaagcccggcggcgcctccgggatcatcatcgtcaagaacggcaatgcgggcaaaaacggccgcgtggtgctgggcgcggccaacacctgggacggggtctaccaggtaacggaccatgccgcgctggagctggcgcatgcgggcgcgctcaatacgaaagccggagtcgaactccagggagcggcttcccgactggacgtgaaggccggaacggtttcctacgccgcttccgtgaagctggcgggagcgggagcctccgtcaatacgctgaattcttcctccctctccgatatttccgtggcggtgacggcccgcaccggggccgcctcctccacggtggagcgggcttttctaggttcttccgccggagcgggaatcgtgcagggagcaggctccgcggcccgcgccctgttcaacggcgtcaacgtgaacgtcaggacgggagcggcgctggcccatacggaattctccggctccgtgctggaggtggccgcagggcaggaggcccgcgtgacggacatgctcattcatgcggcggattccggcatcaggctgggcgcgttttcctccctggccgtcactggcgtttccacaacggatgccgtgccgaacctgaacgtcagctatgcggacggcaacttttccatgacagctcccgatgcgtggacgaccaatgtgctgattaccggggccgggcaggcttccgtggacttctccggcggcgtgaacctgctgctgacggagtgctccggcagcctgattgaaaaactggtggaagcccgtgtgagcaccatcaactttgtgctgtatgacggctccctcaccaatgccttcagcggggattactccctggcctccgtcctttatgacgccgccctgaaaaacgccggcttcatcctggcaaacggggactcctggatgcgcgacggcgtggtgacgctggtgcgcacggttcccgaacccggtacggcctccgtggccttgctgggcctgggcgcgctgctgctgcgccgccgcaggagctgaactcctgaaaaacattccggcgccgcgcgcatgaatcatgcagacggcgccgggaaaggcaaagcggaggaccggagcaaggcacggtccgaaaatggaaatactttattgggcggacttcgcctgctgccagcgttcctccatggcgtccagggaggcttcttccagggaaaggccgtctttggcaagcaggcgttccatttcattgaaacgccgttcaaacttcctgttcgccccggccatggccgtttccgggtctattcccttcttccggcacaggttgactacggaaaacaggaggtcccccagttcctccgtgacgtgcggatcttcctctggcacgggaaggatctcctcacactccgcggtttcctccttcaccttgtccagggcgccctgggcgtccgcccagtcaaaccccgctttggcggcttttttctggagcttccatgcgcggagcatgggcggcagccccttgcccgttccgtgcaggtacggggtggcttccgcgcctttttcctggcgtttgatcttgtcccactgggccagcacggcatccgtcgtgtctgccgtggactgggcaaacacgtggggatggcggcggacgagcttttcactcacttccgcggccacatcgttgaaattgaaacgcccggcttcccgggcgatctccgcatgaaaaaccacttgaagcagaacgtcgcccagctcctcccgcatctgctcccagtcgtccctctggatggtgtccaccacttcataggcctcctcgatcatgttggaaatcagggagtggtgagtctgttccgcgtcccaggggcagccctggggagcgcgcaggcgtttcatgatggcgatgaggcgctgcatttgaagggcaggctcgcggcattcgatcatttcagtgtcgttcatgacggagccatactaatcgcgcaagggcggatgactagcaaaaattcctctttacccggaacggttcttccctacactcgcccccatggaagttcacacgtggaaagaacgcacggaagaaggtaccctggtatacagggcatgccaccacgccagcaaatggaagctggaatgcgcccccaaggtgggccgtgcggaacgtgacgatgtggagtgggaacacgtggaattcacgcgggcgcactgggtgaccctgcgcgacgtgctctggcgcaagtaccagcgcaaacgctgcccgtggcgttttattgaagccatagacaagcttctggaagacatgccggaagaggaggaaaccggttctccccatggggaggacgggcggtaggaacgcccttcaacttctgccgtgccggggatgctgggagcggttttcagggaatggctctcctgggtgtaccctttcgtctgcgagttgtgcggacggggcggactggacggctgtcatgtttgtccggaatgccgggagcgtttcgtgcccattgaaccaccctgctgcgccgtttgcggagaacctgcggaaggttccttcatcccgtccgggttatgcgcccgctgtgcggaaacggctccgtcctttgaggaagcccgcgccgcatacgtgaacgaaggggcattgagggagcttctgctggccttcaaatatgcgggggccgttcatctggccggaaccttcgcgcggatgatggcggaggccgtgcgcggaaatccccactggttcggaggaaaaaagcgcctgctcgttcccgtgcccatgcaccgccgcaagctggtgcggagggggtacaaccaggcgcaggaactggcggcgctgctggggagagaactgggctggccctgtgccggggtgctgaaacgcctgcctgaccggctgccccaggccagcctggcgcggaagcagcggctcaggcacgcccgcaggatttatgccgcggatgaaaaaagaatcaaacgtcatcccgtcgcgggaagggacgtgctgctggtggatgacgtttttacgaccggggccacggcggacgcctgcgcgcatctgctgctccgggccggggcggcttccgtttgcgtgctgacgctggcgcggacgcaccatgcatggcatggctgaaccggaattttctttcagcttcaccgtttccttcctacaatggcagtcatgaatccggagctgatgtttcatacggaagacgaagtcatgttttatgatacggattgcggcggagtggttcataacctggcctacctgcgcatgattgaagcctgccgcaccaagctgggagccaaattgggcatggattacaaaaccatgagcgatttgcagcagttcgccgtggtggtccgccatgaaatcgactacgtacgccccgccgtgctgggggacaccattctgacgacgggatggctgcaatccgtggaacgggcccggttctggtgcgattttgaaatgcgccgcgcctccaacaacgatcttctggtgagggcccatcaacagctggccctggtccggatgccccaggggcgccccgcgcgcattccagctgaatggcgtgcgcggtggcaggaatacatggaatcctgatctttttttgtccgtcttccattttgcgcttgccatgaaagggggcgtggtgtttactgcctccgcccttccagcaagggtaagtgcttgggtagctcagttggtagagcagtagacttttaatctattggtcccgggttcgagtcccggtccaagtaccattccctttcatacgttgaaactccgcaggaagtatttccgggcggagtttcttttttgaggtagccggaaaacgggcgggaacgtggtgttccaccatccaatgagcatgggaatgggtattgccgtgctgcccggtccgtgaggccgccggcggaacggaaagacggaaccgggcggggatgtccatcagggcaaatcatgccggacggcgcgttctatttcatggaacagcaggaaatggtctttcaaatggtacagccatgatcggatgtcggccagttcgtgggtttccagcatgaccaccgggaagatgaacggattttttttaacggagacttcaatgaggccgatgatttcattcctcctgctcaggacggggatggcgaggtattgcatgtatttttcctccgggggctggttgcgcttccggaagaagctgcgccgcacttccgccgggccggagaggactacggggctgagatggcgttcagcgaacaattgttcatccagcatggagggagttcccgtcacgggccgcggaggttgggccagcagagaggggatgtcgttattgtgttctccctgcgcgtagcctgtgacgcgcaggaaggtctggccctgctgccgctccgcctggatgtaaagcacttcaaagatgagggagcttttatattcggccagggctgcggcgatggtggaacacaggaacaggcaggcggagttgaagctttccgtcgttgcgcgggagccgtccgcttttttctcccggcggtcttctccattcagcttgttggcgaagttttcatattccccgctgagggcggcgtaggtttttttgtaaagagccgcactgcggtttttcagggtgcaggcctgtttcttcatctcccggttcctgttgatcagcctctggcattccacgtgccacacgatgaaagcggcgcccaggataaccagcaggacgatttttcccgtgttggcgccttccatgggcgtccctccgatgatggagatcacaacgaccaggatgggctggaacaggtttgcttttttgaggaaggagggctctttgaacataagaaagatgcgggagaaaggttggttgaaaagaaggtgatgctgtacaagtcttgttaaaggtgtgttatttgttgattatcaaaaatattccatattgaaggttgaaatggtgcggaatgaaagcaggaagcggagaggttttttcttatgccatcttaaattaagtttatttataatcaatgagttttttgttaatttagaagcattctaatacgatatttctttgaatgataaggcttcctttgttccaataattgttaggaaaaaataagagttttccatttgggaaacgatttgttaaatcgcagtgttttgatatgttttattttgattcatggaatatctttgtttacagggtaaaagcatggagagccggagcaagctccgtccggagggccggactccttgcggaattgtccgtcaatatccggatggggaaaaggaatggtgaatgggcccccggatatcaaggggggaacaaatattcttccggctttttcccggaaatgatgcgggttacggctccggtggctgcggtgccggaacgtcagggcttgcccctggaaaaaccctgccgcggtaatgttccgtgcgcgcctgccaggctgcccgccgtgccgcattattcggcatggttttcttctgcccacttcctgtactgtgcggacagttgttcaataagcggctggtgcctggaagcgaggtttttttgttccgtcctgtccctgatgtcgtatacctgccaggggccgcggttgggagccaccagcttgaattggctggtcagagccgcgcggttcctctggtgctcccagaaaatggtgcgggaagggcaggtgccgggaatgtagtcccataccctggacggaggaagctttccgggattggcccagtaggcgttgagcggtttgccgtccatgtggacgggaaccggaagctgggcccacgccaggcaggtgggggcgagatcctgaagcaggaagggggagtgatagcgcgcgccgggacggattctggaagggtagcggatgatgaaaggcgcggacaagccgccgtcaaaggtctcaatcttatactggcggtagggagtgttggacacggccgcccacatgagaccgtacccgtcccggcagccggcttcccccagcggaccgatgggaagaacggttttcttgttcctgttgttctggggcatttccgccgttgcgccgttgtctgacaggaacatgacgatcgtgttgccgctgaggcggtggcggtccagggacgcaaggatgcggcctatgccgcggtccatgatggagatttgggcggcgtaggtggccatgcacctggaaaggtagtccttgcgctctgctgtggccttttcatagccggaaggattgaattttcctgccatgcccagcttggcggagggagggacgattccgagctgtttttgtttttccagcctcttggaggcgatggcatgcggagattttccgcggtaggacggcagcattttttctatttcctcccggggggcctgaaggggtgtgtgcggggccgtgtaagccacgtagaggaagaagggttttttgcttttggcggcgtcgtcaatgtaggccagggccgtttgggtgatgtcttccgtcatgtagaaattctccggcaggtcctccggccggagcaattttccgtcttctccgaaggggcggtccggcatgggcttgtagtaatccgccgcgcctcccagcaggccgcgggaacggtcgaagccgcggtcccaggggtaggttccccggactttccccagatgccattttccggaaaggtaggtacggtatcccgcttttttcaggagttcagggaggatggggatatccggattcagccgcccgcggtagccagggcgtccgctgtcgtcgtccagcagccctacgtccaccttgtggggctcgcagccggtcatgatggaggcgcgggagggggagcagcgggaagccgtgtagcaccgtgtagccagcatgccctgtgcggcgagggagtccagatggggagtggggatttccgagccgtagcagcccaggtcggaccatcccatgtcgtcagccaggatgaggacgatgttgggcttgtccgccggggaggggacaggggagagcagccagagggccatgcaggccaggagggggaaacttggaatgaaacgcatgggaggaacggggtgtatgataaagcaggcaggcccgcggacggatcctgcccggaggctggaaaaggaaagctgtcttccctgttggcccggacagcttgcgcgaccgggaattcctccggaaaaagccgggtgggcggatatggtgcgccggaaaaaatgcgtctgctaccaccacaggacggcgcagagcagaatggcggctccgtaggccatgccgcccaggcagaggggcgtccaccaggccggtttggagcatatcttgttcaccatgtcacggtacaggtagggtttgcctatccagaggagggaaaggaaaatgacaatgtagcaccagatggggatgagcagcctggtgaccgggtcctggaggaaggccgcgctgagaagaggggccgccaccatcaggccgaagatgccgagcgcccgcggaaagagcaggtttttcacatgggtgaccatcagcaccaggaaaacgggacacgcaagctggagcagccagcggatgccttcaaactccgccagccctacccggaaataactcagcacgcccagcccttccggagccaccagcaggaagaaccagaacaggccgatggccagcagaacctgggccagcaggtggttgcgcggggaggccagcagaaaggcctgcacctgctgcctttttaccagtgcgtaaaggtgaaccagcagcagaacggcgcccaggacatatcccgccacgggcagcggtatcattccatcatacggatgcaggaagggagcgtgctggttcatctgaacgctaaccttaatgattatcccggcttcgtaaaggcgaatcagcgggagagagaagaaaattccatcggattcccggcgtcaggccgctggaattcccccgcagccggcggaggaacgcaggctcaggagccttgggtgactttttcaaacgtgggatcctccacaggggtgattttcccgtccgcgtaaagcaccatgatgcctccctgatgacgttccagggccgggaccacgatttcctcaaagtcctgctccgtgatgacgctgcgtccgtcaagcggaatgccgtcgctgatccagggcttgccgcgcagggcctgcccgcgcgccacgttcatggggcgtcccttccggttgtccagccagctggtgtaggaaatggtgtccgggctggcgggaaggatggaatcttccgccgcgaggatttccggccggttgtcattcttgcagcggaaggtgtccggaagcatgttcggctccttgtcgctccgggcgatcaggtcgggctgttctgcgttcacgatgggggccagggcgtcccaccagttccggcactccctggcggtcagaaggctgtccttcatgccgctggagggcagtttcccgccgttctggcctgcgaattccttgccccagtcgctgatgcggcgcaggttgtccgtgcagcgcgttctggccgcagtctccgtagcatgggaataaatgctgtaggatacgccagccagcagggcgatgatggcgatgaccacgagaacttcaataagcgtgaaacctttgctgcgtgaggggagtaagcgggctttcatgatttcccgccattatgcacgattgccgccgcttgaaaaggcagaaactgcgccctggggcgaaaagcgccggacggagctccggaaacgaaaagggccggtcccgtgaaggaccggcccgcaggaaaggaaatggctggattgcgcttacttggcggaagtgaccagcgcggcgaaggattccggcttcagggaagcgccgcccaccagggcgccgtcaatgtccggctgggccatgagctccaccacgttttccggctttacggaaccgccgtactggatgcgcaccctggcggcggtgtccgcgccgaagacgtcggaaatgaccttgcggatgaaggcgtgggcttcctgcgcttccttggaggtggcggtcaggccggtgccgatggcccagacgggttcataggcgatgaccaggttggccacttcttccggggtgagatccttgagaccgcccttgagctggatttccagcacgggttccagaatgccgcccaggcgttcatccttcgtttcaccgatgcagaaaatcggggtgatgccggcggcgatggccttcttgatcttggcgttgatgatggcgtccgtttctccgaagtactggcggcgttcgctgtggccgagcacgacgtacttgaggcccagttcattcagcatgctggtggagatttccccggtgtaggctccgttgtcatactgggagacgttctgggcgcctacggcagtgcaggagcagccgttcagggcgttcagcacggaggggatggtggtgaaggggggaatgacgaccacgtcgcatgcgacgtcttttcccttaacgaggtttttgaagctttcgatgaattgggcgccttcggcggggccgatgttcatcttccagttggcggcaatgatgggtttgcgggacatagtggaatgagattaatcaggagcacgcattgttgccaaattggggccgaggtcaagcacagatcaaaagggccgcatacgcgccgtccgatttttcctcatggggaaggatgagtttttcctccttcagggtccattccgggtggttttgcagaaaatccctgaccaccaggccgtcttcctccgcgtcaatggaacaggtggaataaaccagcctgccccccggcttgacggcctgagaggcgttttcaagaatgctcctctggagggcggccaggcggcggatttcctgcggggtcaggcgccagcgcacgtccacgcggcgctggatgaccccggtgttggaacagggcacgtccagaagcacggcgtcaaaacggcgttcccattccggagggcaggggagggaccagtccgcctgcgccgtccggacggaggaggaaccctgcctgtccaggttttccttcaaggtgggcagacggtgttcatggaggtccgtggcggtcaggcgcgccttgcctccggtagcggcgatgatggcggcggatttgccgccgggggcggcgcaggcgtccaggatttcctcgccgggccggggagccagcaggtcgatggcgtagcgggtggaggggtccgccacgtaaagggagcccgctttgatctcttccagcggcagggcgccgtctacggagaaccagccgggagcgcggtccagcggagccagggaggctggcatgccgttcacggggaccagcggattggcgcggacgtacaggcgcggcgtggtgttgttccagtggagcagggcgcggaccgtttgcggctccatctgctgcgtccaccgctgcaccagccacgccggggtggaataaagaacgggaagcggcagtttttcccgttcctccaggatggctttctcccgccgaagcgcgttgcgcaggatggcgttgacaagcccccgcaggcgtgcgggcgcaagattgacggtttcatacacggcggcgtggtctgccatccccagcaggaaaagctggcacagccccagttggaggataaggcgcatttccaggtccagcctgcctttccgcagggagtcgatcacatggtccagccaggtctggttgcgcagcacgccgaagacgagggcctgcaccagatgcctgtccgccgtggaaagcgcagcccgcgaacattcccggtccacgagggtttccgcaaaggagcggccttcatgccagcgcatcaggcaggtcagggctgtctggcgggaggtggggggattgttcttcaccggggaactctacatgcggaacgttcaagtttcaacctgcaaaagcaagcggcggaaaaagggcggttttccggggttgttccggcttttgcctgtcttttctggggcttcccgcttccttcctgtaaatggcctggagcctttccaactggtctttccttgtttccgccagattgtgcctttcctccgggtcgctgctgatttgaaaaaggagccacttgtcctgcttgtgcgtgagcttccagccgtcccccgtgatgaccgtgtggtccaccactacgtaatcgcgctggctggaaggtttgccgaagagcatgtttttataggaaacggaatccttgccttccggcatgcccactcccgccagctcggcaaaggtggccatatggtcgtagttggctaccaggctgcggcaaaccttcccgtgcggcacggtcccgggccaggagacgatgaggggaatgcggatgcccccttcatggttggtccatttcaacccggccaggttgaccatggcgttcttttggccgatgagcccgcggctgccgcggaaaacgtccagcagctccccggtaccgtccagaacgccgccgtggcagttgaggccgcggccccgctccttgtccgtgcggtagtaaagttcatgcccgttgtcggagctgaaaacgatgatggtgcgcttctccagtcccagtttgtgcacctgggccaggatggcgcccacctgcctgtccagcttgtccaccatggaggcgtattcctccgccgccccggcgcattccctgttgccgcccgcggcgcccgcataggcctggcggatggctggatgaccggcatacttgttctctgcggggggaatatccaccgggccgtggggcaggttggtggagaagaggatgaacatgggcctgttccggttttcctccatgaacttgagggtctccgccagcatggcgtccggagcgtacgtcacttttccgtcccggtttcctctccgtttttccgtggctcccggcccgtaaatctccggggtcttgccgccgtcggcatgcgtgttgcccggaaggggaaggcgttcgccgtctttccagaggaaggagggataatagccgtgggcccgctgatggtccatgtatcccacgtaacggtcccatccgtgccttttcaactctccgtgccaggtggtgaagccccactccagctttccgaactggcccgtgacgtatcctgcctttttcagtagttccggaaggaaaacctctcccccggaaggcttgatgcgggccgccctggccgctttcttttccagttcctcgttggaccagccttgttgttccgccgtgatgaccaggccgccgtttgtctgggtgtaggagcgggagtggctgtcatgcacgcccatgagcagggaggcgcgcgccgggcagcagtattggctgctgtagcaccgggtgaacatgatgccctgtttggccaagcggtcgatgttgggcgttttcacgatctcctggccgtagcagcccagcatgcccatgcccaggtcatccgcataaatcagaatgatgttgggcctggaagcggcagtggccgggaccggacagaacgccagcgctgaaacaactgccagaaatgtgcatgaaataaatcccatcacgggcagtacgtggaaaaggaaaggattgttgcaaagaaaaaaccgtccggaactggtattccggacggttgattgaaaacgttgtgttgcgggggcttagttgccgtagggtttgttgacgcggctgaactgcttcaggcgcaatccattgaggtggatgaagccttccgcgtcgtcctggttgtacagttcctcatggccgccttccatcgtggcgatttcttcggaatacagggactgcggggaacggcgtccggcgtacatgacgttgcccttgtaaagcttcaggcgcacttccccgttgacggtttcctgggacttggtcaccagagcctggatggcttcacgttccggcgcaaaccagaagccgttgtaaaccagcgtggcgtattccggaatgagggaatcgcgcaccttctgcacttcacggtcaatggtgatggtttcaatgtcgcggtgggccgccagcaggatggtgccgccgggggtttcataaatgccgcggctcttcatgccgacgaagcggttttccacaatgtccacacggccgatgccgtgcttgccgcccagggcgttcagcacgtacatgacgcccagcgggctgagcagggtatagccgtcgcgttcacccttcggggtgacgttcagttctttcagcagcgtgtcaaggccgtcgtacttgatgccgatggcatcgcccttttcatacaggatctgaatgtattcggcctggtccggagcgtcttccggggaaacggaaagcttgtacatctcacggtcggcgggggtggtgccgtcgtaccaggtatcttccagcatccctgcttcaaaggaaatgtggagcaggttgcggtccatggaataaggctttttcagcgactggcggatcgggatgccgtgggattccgcgtaggcgatcatttccgtacggcccgggaactgcttgcggaattcggggtcgcgccagggggcgatgaccttgatgttcggggccaaggcattgacggccagttcaaagcgcacctggtcgttccccttgccggtggcgccgtgggcgatggcgtccgctccttcacggatggccaggtccaccatgtccttggaaatgcaggggcgcgcgatggaggtgcccagcaggtagcggccttcgtaaagggcgttggcctgcatcatggggaagatgtagttggcggcgaagtcttccttgaggtcgccgatgaagcacttggaggctcccgtagccagggccttggcttccaggccgtccagttcttccgcctggcctacgtctgcgcagtaggcgatgatttcggcattgtatttttccttgagccacttcagaagaacagaggtgtcaaggccgccagagtatgcaactacgattttcatgtacgtcaatgattagtgtgcggcggcatgatgccccattccccccccggaggaaaggacaaaatcatgtttaaccacgggctttttcccggaactgtccggagcggcttccccgggatggttcctgaacaaaaacgagaggaggttcgtcaggattcgttcaccgcataagcccggaaagctgcttttaattctttttcttgcctcctctatacagaaactccgtctccttggcgcgtcccaacgtccggtccaccagtccgttgatttcccggtcttcgtatcccgccatccggatgtactggcgcgcttccgccgcacggccgggaaagtatccaaccaggatgcgaattaaatcttcctccagccattcttctatctcatatttcatatcatcatttctgccttgggccacgatgaactggtcttcccagccaaaaacacgtccctcccggtgcaccttccacgtgttcttttccccttccttccatcgcttcctcagcttttcttcggaagtcgcctggtgctccttccggaatccttttaaaattaccgctgtatataacgcgctgaactttccgatctccttctggttcacgttcatgcgtccggcagattctttttttataatacggcttaggcatgaaacggctaccctcttcgtatccatatctcccgtccttcttccgtattcccacggatgctctccgctgaagtccacctggtagaacggcgctgccgtcaccagaccgcacaagtggtacagttctcggcattgtcttcccctcaggtcatcaatatggatcacacaatagatttggaacagacgggctgtgcacatgtagaacagttccagctcgttctttttgagcatttcctgcaggtgccagagcggaggatacggttccttcaccggcaggtacatccatcccatctccgccagcatgcggtagcccggatactcgcggggctgggccgtttccggataagccaggggaaggcgagaccccgggagcgtggcggctccctgcacccggggcgtgatgccggagcaaagaaggatgagcgggaggacgaggtggaatgttttcatcattattgtggggatcattatttgttgtcttgcggggaaaacgcatgggttccctgctgggagtcgcgttccacctggcattcaaatttggaaatccatgcatggacggcttttctggtcctggggtccgtccaccggaccttgaagctttgcgtcacggtattgagcatgtaaacatcccggtgcagaatagactgcacgtaacgtttacatgcccaatcccatttctgttccggggcatccggactcaatccgcctttcacctcattcatcgtctttttccatgctatggtgtcaatgaccctgttgccgggatcaatctgggaccatgtttctccgggccggtgcctgcctcccaggggaggaaaagttttgtcgctggcgtccgcgtctttttcaatcacatggatattctggaaattgactttcgtgggatggatcgtcaattccagctgggcggaagctccgggtttgccccggtcctgtgcctcatccgtaggaaaaccgggaaatttttcagcgtccgcaatcattcccctgccgcctccttcctttttcctgtgcttcccggtgatgtgggtagggatgcacacttccagtttgagcggtttatcgggcatctgctgcgtttttgaaccatatgcccagactttgatcgtatggttgtttccgacggtcttcggacccaaatcctcattgatggacaatgttactttacgctttccatcagttattccctcaaagctgcccaaatgcgccccgtccgccaggctccacctgatgtcctcatcttctccaatgagcgccttctttcccgtcaacgtcaaggtaaccttctcgcccatgcccacgcaggtcctttttttatcctcgtcctcgtccggattctgtccttcttccttggcgatgtggtaatccgcggaatacttatgcgttttcgattcaatcttcagaccttgcatgggtccctcctcttccgccgtcacacggcaggggcatgcaagaagtgcgccaaagacgcagatcttcataacaaccttgtttttcaacaacattcttgaaaaagttttccaaaaatacgattgaagtcaagggaattcccattttatgctgatgccttgcagatatgatcccgttccgccggggaagaaatgattaggaagagttaaataatcgactgcttccgttccgccggaaacgcctgtgaggcttttcctgatggtgccgcttgcggaagaaacaggcgttcaagccgatgtgcggaagctgccaaaaaggacggatgacattgaaaacggcttgaatttgatgaaattgaaaaaaagcgcttgatttttcatccccggccctctacttattccgccgaacttatggctaagaagagctggatcgcaagagacaagaaaaaggctgacaccgtcaagcgctacgcggaactgcgtacgcaattgaaggctgagaaggattatatcggtttaaccatgctgccccgcaatgcaagcccgacccgtacggtcaaccgctgccttgtttccggccgccgccgcgcatttatccgccgtttcaagctttcccgtatttccttccgcgaactggccaacgccggcatgatccccggtgtgaccaaatccagctggtaagggcagggaaaggttgcagccttataaagattttgacgctaggctgatttttatttagcctagcgttttactatgcccatatacgagtatatttccgaaaaccctgacgaccccggccagtcctgcccggtgtgccgccgcggttttgaattgcggcggccggtggaccgtgcgccgcttgaaaagtgcctggtgtgcaagcatccggtgcgcaaggtcatcagccggatcaatgtgccggaggcgaccaagcctctttccgtttccgacgccaaggcagccgggttcaccgtgctggagcgccgggacaagggcgtttatgaaaaactgtaacacaaaagccgggaaatattccggcctcctttcccgtatactacttgaaacagaatgaatgatccggaccctctgagtattcttgcggcctttggggccgctgaagcgcccgacgctgttccggcgctgggtgggataacgctggcgattgccggctttatcctttttttactgctgaacgcgttttttgtggcggccgagttcgccctgatgaaggttcgcgaaagccagctgcacgccggggatggcgttccggcgcgtacccgtaggaagctggcccgggcacggaaggcggtcaagcaccttgacctgtatctggccgcctgccaggcgggcattaccctttcttctctggcgctgggatttctgggcacgtttttcgtggcggagctgacggctcccttccttgtttccctggggctgggcggtaaggttcccgtttacggcattgctctggccgttacgtttattttctttgcctgctgccaggttatttttggggagtttattcccaaggccatggcggtgcgccatccggacagggccgctctggcgacggtccccctgctgcatttcttttacacggtattcaaatatacgggcattcttggcctgacggacggaattgcccggtttgtgctgaagtacctgctgggtatcgatccccgctccacggcctgcacggttcacagcacggatgaactgatgtacctggtggaggaaagcgaacgttcccgagagctgacgaagcaggaggcggagatatccaagaatgcccttgaactgaacgacatgtgcgtcaaggacgtgatgacgccgcgttccgaagtggacgtgatggatttgacggccccctttgaggagaactgggaacttgcccggaagtcccgccatacccgtttccccctggtggagggcgaccatctggacgaggtgaagggctgggtgcacgtcaaggatctgctcaagctggtagggcaggaaaatccggaccttagaagcgtgcggcgtgagttgcgcgtggtgccggatacgatgcctctggacagccttctgacgttcttcctgaaagagcatgcccattttgccctggtggtggatgagtttggtgattccatcggcctggtgttcctggacgatgtgctggaacagatcgtgggggacgacattcaggatgagtttgaccaggaggaaatgcgggaattcgtcaagaccggcaaggatacgtatgccgtgaacggagccgttaccctgtttgacctggcggattacctgcctgaaatggacctggattgcccgggcgtcaccacgctgggcggttacgtgatcagccggctgggttacattccggaagaaggggaggaattgaagattggccgctaccgggccgtagtgacggggtcggacggcagaagaatcacgcagattctgctgacccgccttccggaagaacaggaggaggaataaggccatgacggaaaagtcacacccggatatgagttttgaaagggaggcccgttcctccggttttctttatgtggccggggtggatgaagccggccgcggccctttggccggccctgtggtggccggggccgtcattctgcctgaactgccggaggaactgtccgggttgaatgattccaagcaattgaccgcggctaagagggaacgcctgttcctggctctgctggattgcgaacaggtggcctgctccgtgggggtggcttccgtggaggaaatagaccgtctcaacatcctgaaagccactcatctggctatggcgcgcgccgtggaagggctggccccgcatgcggatttctgcctggtggacggcctgcccgtcaaggggcttcccgttctgcaccgcgctatcgtgaagggagacggcaggagcctttccattgccgccgccagcgtgctggccaaggtgacgagggaccgcatgatgacggaggcggatgcctcctatccgcagtacggttttgcaaaacacaagggatatggcacgaaagcccacatggaagccctgcggaggcatgggccctgtccgcttcatcgccgctcgtttgcgccggtttcacaaatggaactgtccattcctgaataggaaggagcgggatacggcatggctgggaatgtacggggaactggcagcggcctctttcctacgtggggaagggtgttccgtcttaaggaggaattggcgtcccgtcaggggcggggaactggacctcgtgtgccgggacgggaactgcctggtttttgtggaagtgaagacccgtacgggaaacggttacgggggagcccgccgcgccgtggacgcccgcaaaagggcgctgatacggcggggagcggcggaatggctccgccagcttccggaaccggttccctcccgttacgatattgtggaagtcctgtaccgggaggggaagcccccggaattcaggcgtatacgcggcgcgttcggggagaaggatttgcccgcttcatgaaaagcgccgcaggcgcagggcgttcagaatgacggatacggagctcaggcacatggcccctgccgcaatgacgggagaaagcaggatgccccagaagggatagaggatgccggcggctatggggatgcccagagcgttgtacacgaaggcgaaacccaggttggatttcatgtttttcacggtggcggtggaaagggcgaaagccttggaaatcaccagcaggttccccttcaccagcgtgacgccgcagctctgcatggctacgtccgatcccgttcccatggcgatgcccacatccgcttccgccagtgcgggagcgtcgttaacgccgtcccccgccatggcgaccacggcgttcccgcttttcagggaggcgatgagcgcctgcttgtccgccggtgtcattcctccgtggaattcggaaatgcccagctccctcgccacggcttccaccgtcgcgggcgcgtccccggaggcaatgatgatgcggatgccgcgcgcagtaaggtccgccagggcctggcgcgtgttttcccggattttatccgccagggagaaggctcccgccgcctggccgtccaccgcggcaaagacggtaacgcggccctgcctccgctgttcttccacccacggagccagggaggagatgtctacgccccgcttctgcatcatgtctgcggtgcctacgcaaaccttgctgccctggaaagtcccggccacgccgccgcccgggaaggactggaaatcctcaatgggcgacagggtgagcttttcctccgccgccttctggaggaaggcgcgcgcgatggggtgttcgctgttctgctccagagaggcgcaccgggcgagcaacgcgtccatattcacgttgttccccgtggttacgttgaccagggatggcctgccttccgtgagggtgcctgtcttgtccatcaccaggatattgaccttgtgcatggtttccagagcggccgcgtcccggaaaaggatgcccagggaggccgcctttccggaagccaccatcatggacatgggagtagctaggccaagcgcgcaggggcaggctacgatcaggacggcgacggcgttcaccagcccgtgcggccaggatggctgcggcccccagaatccccaggcgaaaaacgtgagaacggcaatgagcaccaccgcaagcacaaagtagcgcgccaccttgtccgccagcctctgcatgggggccttggtccgctgggcctgggccaccaggttgacgatacgcgccaggacggtgtcattccccacgttctgcgccgtcatggtgaaggtgcctgtggtgttcagcgtggcgccgatcagcttgtcgccgggaacgtgggagacgggaatgggttctccggtcagcatggactcgtctacatcgcttcccccgtccttcaggacgccgtctaccggaatcttttctcccggtttcactctcagcacgtcgccggtctgcacgtccttcaggggaatgtcgctttccaccccgttggggagtaccagatgggcggtggcgggggccagattcatcagggccctgatggcttccgccgtacgggacctggctttcagttccagcacctggcccagaaggctgagggagatgatgatggccgccgcctcataataaacgggaacatgcccgtcatgggtaaaaacggcgggaaaccagccgggcacgatggtagcggccaggctgtacagaaaggcgatggaggttccggctccgatcagcgtccacatgttgggattgcgggtcttgatggaatcccatccccggaccaggagcggctctcccgcccacaggaccacggggatggccaggaacagttccacccagttctggactccggcgttcatccagcgcgcaagatggccgcccatggaaataatgaagatcaggacgacgaaaggcagggaaaaataaaaacgcctgcggaagtcattcagctccgtatcgtcccgggcgtttgcggaagggagcagtggttcaagcgtcatgccgcagatggggcatgctccgggatgatcctgccggatttgagggtgcatgggacaggtgtacaccgtaccgggagcggcggccgcagactccatggcagaggaatggtccatgtcttcatggtggtgcatgggcatgtccatgcccttcatgtccatgccgtgtccggcgtccggagggtgggcaagagcttcttccggcgctgccgtgaatttatcccggcaggaacggctgcagaaaaaataggttttcccctgatagccggccttccagggagtatcttccccgacttgcgctccgcagacggggtccgtgtgtccggaagctccatgccgggcatgcgggctgttggtcatgtccatacggaaagtgagacaattccgggaccctttccgttccgggacagccatgattggaaaaaccgcggaagcggcttcaagcccgcatttctccatgcgggcacagattgctcctgtctattatatatagtgcaggaggaaaaatcattccgccctgagcgccagaatggcttccatgaaatcctggggaatatccatgcgggccagttcgtcctgaagaatgacgccgttggctccggcatccagcatgcggcgcgcgtcttccacggtgcggatgcctcctgcggccaggacggtgacggaggcgggaatttcttcaatgagtttttccgtaaccgccggattggcctggagggtatgcgggtccgcattgttgatgcagacgaattccgcttccagatccatggcggtttcaagctcattcagggtatggacttccatcatcacgtccagtcccagcccggaggccatgcggtacaggtcttccaggtccttttccggcagggcggccgccaccaggttgacggcgtccgctcccgagacgatggcctggcagatcatggcgggatggatgaaaacgtcgcgcgccatgacggggacagtgctgattctggaaatggtggaaaccatgtcccaggaaccgccgtatacctccggttccacggcgatggaaatgccctgcgcgccgccctggatgaacatgccgtacaggtggcggaggtcctggtttgactcccggaggttgaggacgggatggaccctggacatttccgggacgacggaaagacggttttccccaaggtccaccgcggtgcggaatcccgcatagtcattcctctggatggcggaggcccgcaatttcccttccaggggaaggatttttttcaagtcggcgcgtttgcgctccagaatgctgtttaaataatccatatgttactttttgggcaggaaataggaacgttgcttttcggaaatgggaaggccggcctgttccatgacgcacagcatgtcctcccaaacctttcgtttttctgaaatatcctccgtgcggaggaggtagctgggattgtaagtaacgcgcacaggcgtgtcgaaagccgtgtggaacgtccccctcagggcggaaagcggcgtctctccggattggaggatgcccctggccgcgatggcgcccagggctaccaccactttcgggcgcaccagcatgatttcctcccggagaatggggagggatacctctatctcccggtccgtgggaggccggttgttggtaagctggcgggggagggcggggcggtacttgaccagatgggtcaggtaaatgtccgtacgggaaagccccatggctttcagcatggcgtccagcttctgtccggaggggccggccaggggaacgccctgcttttcttcatacaggccgggggcgtccgtgaccatcatgatgtccgccctgggactgccggaggaaaagacgggcgtgtcccgcagggactccatattccgaagcggcggccagttgacgaccagttcccggagggaggacagtttctcttcctccgtttcaccttccagggcaaaggaaatatggcggggcagcgtggcttcctcctccgttctgcccggctgtactccgttgaggatgtcccggagttcgttgccgaaggaaacttcatccacggagtccggcggctggcctggaatttccggcggcggctgcgtttctccggaaacagagggggcggaaacggaagaggggatttcccccctggcgatccgccgtgcgtccatgacccatttcctcaagaccgttctggcctcctccgtgacggcagccttctccacgccccgggataacagggcgcgcaggtagtccagcgtgaggtgttggggcaggccggcagacatgttcgttccggagtgtaatctatttccggagggatgcaacagcccattgggtgtgcgcccggccgccgggagcaggaggcttggcgtcatctgaagagcgtcgcaggaaagaggggaaagagaaaaaaggaagggcggctatgaaatttcccccctcttgtccatgaatgccgttcaacggggcaacgcccgcctgcaagcaggcatgcttgttccgggaccgttttacaggaggcagggaattgattcgttcgccttccggctttccctgctcttcagggttgaagcttcgttttccgtccaaccgggcttttccggttcccgctccggaaaaattacaggagaaaacggaaggattcctttcctgcgcagagcgggctgttccccgcatctttctttttcttggcatggaagtttctccagaatttgaaaaactgctgcaagacgggttacgggatgttttttcaatcaggcctgcatgcctttttttctatagctttcccatggccggagcatgccccggtaaaaatcccgtgtcccgaatccttattgccgggaaatgttcttcccaacctcttcccgaaccctgcattgcggcatattgggaagcaggaagggcgcagataaggaaacgggaaaggaaaaattcacgtggaagcctgaacagcaaagggaaattcgttcaaggggagacgcgatttttccatccatgacggccttccggaatttggcccattgaacttttttagggaatcttttgaaggattgaggtcgattttctcttatatcatatttatagtaagcaagatgtattaaaaataaaaaagtgtgtcgtgatgtgatagaaaaagatgtttcgtgaagtatattatttgtcatgatatgacaaaaatgcggcatgttttatatattgcttatttttagcgttttatattaataggttttccttgtttggaagggggtcggtgaaaaaaaaggattgccaaggcagaaattatttcgtacccaagagccgccgttgccgatttttcggcttccgcacatggcctgaaggttctgccggagtgactgccatgtgtatggcgcctaacctcataccgcatgaatttaagaataattgccaccctgtcttgtgccgtcgcggccatgtttgtcagcagctgctcgacaaacggagctgtaaccggcatggggaaatccagtagtgacgcccttgttttggcccgtgtaggtgaaaatgcccagggatttgttcagcccctggcgccgagccgttcggcagtgccttcttccaagctccccaaactggggcgcgacaaacacaagatgccgttttaccaccccgcccagcgcactcgtgtagtacgcaccacggcttatactcattccgaacgtgaccatctggcctacggaccccggaatgccgttggcacgacgctgaaatacacttcttccgtgcgcagcgccgctgcggactggtccgtttaccctctgggaacaaccttccgcatcaaggggcagccctatctctacgtcgttgacgattacgggagcgccctggtcgggaccggaaccattgacatttaccagcctaacaagaagctgatgaaggaatggggccgccgctatgtggaactgaccatcgtccgctggggagaccccgccaacagtctggaagtgctcggcagccgccgcggctacaggcactgccgcgccatgtatgcggccctgcagcaccgcgtgtccaaggggctttacgccaaggctgactgaccggattcctgaaccctttaacccgggcgccgccattcatcacatggcggcgcttttttattttccggcgtgcgtgcaggatggtaatctggcggcatggatacgaaaaaacgggcttccattgtccgggaggaactcatgtccctgtatgggaaccctcccattcccctggcgcaccgcgacgcctacaccctgctggtggcggttcttctgtccgcccagtgcacggacaagcgcgtaaacctggtgaccccggccctgttcgccctggcttccactccggaggaaatggcccggcaggatgtggaagcggtccgggaaatcgtgcggccctgcggcctctcggaaaggaaggcgtccgccatcgtgaacctcagccgcatcctggtggaaaaataccaggggcaggttccctgcgactttgcggccctggaatcccttcctggggtagggcataaaacggcctccgtcgtcatgactcaggccttcggcgttcctgcctttccggtggatacgcacattttccgcctttcccggttgtgggggctgagcaaggggaaaacggtggaagccgtggaacgtgacttgaaaagccttttccctgaaaattcatggggggatcttcatctgcgcatcgtcttgtacgggcgtgaatactgctctgcgcggggttgcggagggcgctgtccgatctgcagccggctggcccgggaagacggttccgcgggtgtctgaatttttgccagggcccgaaatgaatgcttgcaagtctgaatttgcatgctttaatacaccagtatcttttcgaacaaccatataacttaaattatgaagaacctttttagactgggtttccgtttcgccgcatttgcttccgtcctgatggccgcgttttctacatccgcctttgctcaggaagctgccgaagccgctgttccgcaggaacagaccatgcttgacaaatggatcatcgccggtggttggaccatgatcccgattatgctggtggaagccttcatcgttttcctggtaatctacaacatggtggctctgaaaaaggaaaaattctgtccggaagacctcaaggtcaccctgttgcagctgatggccgaatgccgcatccgctccgccattgaagtggcagccggcagccctacctatctgggccgcctggttgcgtatgccctgccgaatgtggacgccacccgtccggaagaccttggcaaggacgccattgaagacgccgtagccgactttacggccaatgaaagccgttccgtattcaaatggattaacatgctggccctttgcgcgcagatttcccccatgctcggcctcttcggtacggtgcaggggatggtgggcgcgttcggcacgctgtcaagcgccggacaggcagaccccacccagcttgccggtgacatctccgtggctcttctgacgaccttctggggcttgatcaacgccattatcgccacgccgttcttcttcttccagaagggcatcgccaacgcccatattgccgaatgcgtaggcaccgtgcaggaaatggtgaacacctccatcaacgtggtgaacgccgaagcccagcttgcccgcattcccgaaggcctggcctgatcgccgggaaagacggtccggtccggaagtttccgcccaggcggagccgggccggagaatctcaaccaaatgtagcttatgggtaagaaaaaagccaatgtagcggccgacgaagagagcggggaaatggatatgtcccccatgatcgacatggttttcctcctgttgatcttcttcgtggtgaacgctacggccattaccgttaaaaaggataagaacattcaaatgcccacggccagcagttccggtgaagtgaaatccgccaacggctgcatcgtggtgaatgtgtacggtgaaggggatggaaagcgtcccgccggcatggatcccaacgttcgctgggcttccgatgtcagtgcgccgctcaactctccggatgaactgaaggaatatatcaaaaaccttgcggaacgcttcaaggacaagcaggactttgaaacccgcctgtatctgcgcggcgaccagaaggccctgttcaagggctcgcgggaagtgattcgcgtggctgcggaatgtggcgtggtcaaggtgatctttgccgtattgcctgccaaaaattcctctgctgcaaacaaggacgaataacattacgcgctatggcaagacataaaaaattggagatggttgaggatgaagatcccaagctggatatttcctcccttatcgacgtgtgcttccttctgttgatttacttccttgtggcgacctccctgattcaggaacgcaagctggacatgtccatgccgggacaatccgtgagcgataccgcctcccagattgaaccggcgctgatccgcatcatcaaggacggcaccatttactggggcaaggacaacagcctgatgattgacaatgacatgaacaaccataacctggcgaccctcgtgcagcagctggaagccaagaaacaggaagccagcgccgtaggcaccaagccggtagttcagttgtgggtggagggcgatgttccccaccagcgcgtcattgacgtcatgaacgctttgacggaagcaggaattaccacggtggccctgaccgacctcaaggacgactaagccattcacggatggaccgtgttattgatgttcggcttccctgcaagagtgtggaagtggcccgctgtctttttttcttatggtccggtcaaatcatgcagcccggtggggggcaatcctgatcgtcttctcgaacgccgttcaggcattaccgttgaaggcgtctcaggaatcgggcgcctgccgcagcatcccggtttccgagacggcaggatgtagtgcgcggcggggagaggaaggccttcagatgcgggaagatgaacattccggagaaatcaggtcatccttcggcaacatcgtgatcaatgtgtatggcaaaaaggaggacaggcgtccggaaggtattgattccagtatccgctggggatccggctcccatgagcctctccattccccggaagaactaaagaaacatatcaagaagcaggcagaacagctgagggcaaagggctgtaaggagcctttcctctatctgcgcggtgaccggaaggctctcttcacggattcccgcgaagttatacaggttgccgcagaatgcaatgtgaagagggttcgtttttccggacctcctgttgcagcagttccaggcattcctgaaaggccgcagagcgggacggtttcatcaatgccgtccgcttccatttttcttcttccgcatgctctcttttacggtaacgggaatggccttttttatcctctggtggaggagaaagggagcctgggggttatcgtcgagtggctgaaaaacaaaaagcggagcgcggggagggcgggaggcagggtagtggttcagttaatggtggctggagatgttcccaatcagcgcgccgcagctgtcatggatgttttgatgagagccgggatggactcagtggtcctgaaaactttcaaggatagttgagagaggggcgttcatttcgttaatggccggaatttgctccggctcggaatgccggatctttttttgaaagagcaggattctcagagataaaaaggcctttttggttccaaacccaatcctcccttaagggaacgcgagcaggaagaactttcttgcaaggatgactaaaaatacagaactttctgctttagagtttgcagcatcctgttagaatgacgcaatccattacagataggtgcattccgtgcatttgcacagatattgtacctattctattatctcttctgtttcaacgaattttaaacacatgatcaaatcaaactatactactgcactggctgcaggcctggtttccgtggtgagcattggggcggcgctcccgtccagtgcccagcatggcccgcgcgattaccagcgcacggccctgaccgccatgaaggaaggcaagtggcaggaagccctggatgccgtggaccgctgcatccgcgtttatgaaccccgtatcaagacgctggggctggatgacggcttcggctggttctattaccagaagggcgtctgcctggcccaattgaagcaatacaaggaagctgtggaagcgttcaaggcgtgttacaccaagttcccgagcgccaagaaccagctcgtgaaaatggccctgttccgcgagggggaaaactattgccgccttggggattttgccaagggcgcggagctgctggagaaattcctgaaggaataccgcagcgaccctgtagcccggaatgtcaatgccggtgaagtgcagggactgctggcccagtgttatttcaagatggatccgcccgcctttgagaaagggctggaaaaccttacctcctgcgtcacctcccgctacaaggggcgccgcattacggatgccgtcatcaccaacggcttcctggcgatggtggatgccgccatcaagaccggcaaatgccaggaaacggtaaaatttgtggaagcccatccttccgtgatgaacatcagccccacccgcgtggcgctgtacgctccccggctggtgagctacattgcggaagtgctggaaaaatcccgcgcccttctccaggaaggaaagcagaaggagtctgaagactacgcctccctggcaatggtgctgatgggcctcctgcccgaccaggccggagtgctggcggacgccaaccattccctggaccgcctgggacgcgccaacggcgccgtgcccggcgtgacggacctctcccatacgctggacaggacgaaggtgaccgccctgattgaccagttcaacaagatgaaggaggaagggaaggtcatggacgccttcacgttcagtttcatgggcaaccaggccctggtgcatggttcccagcgggtcgcccgcgccgcttaccagcttatcaatgaatcctatccggacgccccgggcagggaggacaacctctattacctggccatgactacctggcagttgggagaagcggacaagggcggcgagcttgtggcgcagcacctgaaggaattcccgattcccaagtatgcccccatgctgaacaccctgtccctggaaggactgctgaaggacaagaaattcgatctctgcgtccagcaggcggacaaggtcatggagctgcacaaggacgaccccactcacaagttctatgaattggccctgtactgcaaaggcgcctccctgttcaacctgggggctgcggacgccgcccgctacaaggaagcggtgccggtgctggaacgcttcgtgaaggaataccgtgacagcacctacctgaaaacggccatgtacctgctgggtgaaacctacacgaacctgggcaatacggatgaagccatccaggccttcaccaattacattgcccgtttcccggacaagaatgacgccaatatggccgccgtgctttatgaccgtgccttcaactacctgaaccgcaagaaccccggagacgaggagcttgccacgaaggatgcgaaggaaatcgtggacaacttcaaggagcaccgcctgttcccgtatgccaacaacctgctggcgaacctgtatgccggcagcaaggagcatgaacaggaagcggaaggctatttcctggccgctctggaatccgccaaaaagctgggcgacaagcgccccgccgcggaagccgtgtacaacctgctcatcaatgccaccaagaaacctctccccgtagaaccgaaggaagccgtggaagcggccaggacggcgcgacgggacgaagtcaagaagtggtatgacgagtactggaagaacagcgaccagcccggcagccgctacagcctccagctggctgccgccgccatggacttcttcaaggacgacaaggagatgtttgaccccgcgtccgtcaagatgcaggaagtcattgtgagggaaggcaagaaggacgatcccaagatgaccgttcttctggaggaagccgtcaactcctacaccaagacgtacatggccggcaatcaggcgctgggccgcaatctggacgccaacgccatgcgcaaccacttctaccggttcccaggcgtggacaatgacaaggacaagacgctgagcgccatgctccgcatggccgtcattgcccagacgcaggaacggtatgaaaaggctcccacggaaacggacgaacagcgtgccgagaaggccgctctggaaggtctggtcaagcagctcttcgtggagctgaagcgggacttcaaaccttccgacctgcctccgtacacgctcgtgaagctgggtgtccacctggccaatacgtcccagccggaagaaagcatcgcctactttgatgaaatcctggacccgtcggaacctgatccggtgcgcaagaaggcccgcatcaacggcatgtccaaataccgcaagaatgcggtcttcgggaaggccgttgctctgggccgcagcaaagataacgccaaggtggaaaccgccatcaagatgatgaaggatgaactcagcaaggaggaatccagcgccaacccggaccgcaaggccatggaagacgcccagtacaacctggtcaagttcacctccgcccgccaggactggccgtccgtcattgccgccgccgacaagtaccgcgagaacaagtcctacaagaagaatctgccggaagtcctctacctgcaaggtgaagcctacctgaagcagaacgagctggacaaggccctgatcaacttcatgaacatcacgggcacgtacaagggcctcgtgaagtggtccgctcccgccgtgcttgcacagatggatacgctgtggaagaggaacacgatgtcccagggggcgggcaagcagccgtccgacaggtatatcgcctggaaggccggcagccagtatgtgcaactgctggatactcccgccaaccgcaagaagatgacggcagaagacagtgccctggtcaacgaggtgaaggataagacggccaagttcggctccgatcccgccgtcagccaggaacgggcggacatcgccgcctatgaagccgccatacgcgccgccaagggccagaagtaacaacaaaaggtttagcaatcaacaatatgaaagcactttcagtaataatggtattggccggcttgtccaccctggttccggctatggctcagaatgcccagaatccccagcgcctgcgcgccagggctgccgctccggccatcaagaatggccgcccgacggatatttacattctttccgccaacggccccatggtccagtttgtggaaagcagggaatcccaggaagtcctccagcagatggccagcgccttcaaaacgctgtacatctttgaaacggatgatttcgtggacgccaaggtggctatggaaaaccggaaataccaggacgcccgcaacaaattccacgccctggtgaacaaatatgcctccacgctttccatcaaggacagcctgtccgcccgggcggccgtctatgaattggagtgcgccatgcgcatgatggactgggccggggtcaaaggcctgctggccaagttccccgtaaggggttccaatctgtctccctccgcccaggatgatctggaggttgccaaaatcatggccctgattccggacaaggactggaacggcgtgaaaagccgtgccgcctctttcctggccaccaagaaaaatgccactcgccttcagcaggcgcggatgaagtatgctcttggggccgccgccatggtagcccaggattggaataaggctctggattactttgcggaagccctggtgctgctgcacggttccgatgaagaactggcctccgcctgcgtggtgcgttccctggactcctacctgcacatgccggatgtggccaagttcctggaggattccgccgtgacggctgccgtggaagctagaaaacacaatcctgaaaccgtgattcccgacttgcagatgaaagcccgtcccgcgcacgtcaaggaagcggccgcgctgtaccgcctgcatgaactgatgctcccggacaggaagctgccggccaagtacgacgggtttgcggtttcctacaagcatcccgctgccgttgctccggcccagactcctgctcaggcgcctgcccaagccccggcacaggctcccgctcagccggagaaaaagtagtaacgaactgacgcggagggttttctgccagccgccttccattcaacaaggactgtctccccttcacagggagacagtccttttttgtacttcgttccctcatgagggtaccgcatccctactgtccggaatggctgccgcgccttaggggacgctgcacgttttccggagacattttttcattgggaaaatgcggaagagccgctggcagggagagaacaagagcggttaaaaaacggtgcgtaccgtagggaggggctctcttgagcgcagacttgcggaaaaatatgaggtggcggctgcgggagcgtgttccacaaggaagaaaagacagttttttgcagatgatgcagtttccgggactttgtgcggagatgcctggaaagccatattccgtatgttttgccctggcgcggggaaggagaaacggcgttgttgatgatagggggccggaacagggaaaccggtgcggctgttgcggcttccatgactgtttggggtttgcctccccctcaagctggaagccgggaatgaagaattccgcatggacggccagccggccactcaacgccggagagggaacagggggcaggaaggccgttgcgcggcgctgtcctccgttagaaggtatccttttgttggttttctgcccccatgtacggaacgcccctgcgtccgggaaaaaagctcgtcttttcagaagctttatttttcccgtgcagggtcatttcctgttggaggatttgggaggtccggaagaatgatgtcaggccgcagtgcgccggcgccgcagcatggagagggaaaagccgaacaggcccagggcagcggcagccggttccggcgtgttgaaattgacgcctacgtagccatcccggctcatatccagctcataccctccttccgtccgtacttccagcccttccaggctgatgccgttccctgccagtttgaagtaaaccatgccggatccatccaccggaagagcggccggagttcccatcaattgaaggattacattgttgaataaaagagagccggaggctgtggaattcccctccaggctgaacaggggcttgtcctggctcagggaggccatatctacggtaatggtcaggttttccagggtgacggaagcgcccggggaaagggatgagccctggatgctgatagaatggaagtttttcaaatcgcttgaaaacgtgaggtccgtctccgccggttggaagaccatgatgttgaagcccgctcctccgtccacgctgccgttcactgttccgccggaataggaaaatacatcgtcgccggaacccatgaccaccgcctggccgctgcctcctgtaatggttcctccttccatgaagatgcagttctccctgtcgctgacaatcctgatgcccacgccgttggcgcctgttccctcaatggtgccgctgttggtgatccggatggcttcaaaggcattgccgccgtcggaatcatccaccagaatgccgtaggcctggccgttcgtgttggaattggaagccgtgatggtcccggtattggttacaacgcccccgccgatggcaaggccgtccgcactgccgaaggagtccttggcaataatcgtgccggaattggtcaggtttacgatgtaatccacgtccacgccgtcgccgtccagggtggttgcgtctccggtgccgctgatgacgccgtctttgccgttaaccacggtgaccacgtacttgtcgtcctgctggagggcggcgttccagtcccagttcaggccggaacctcccctgccttcaatcctgccgttattgctgatggcggctttcccttctccggtaactccgtgtttcatgccggtgattttccctccgctgttgttggcaaggtccaggccatgggcaaaggtgtcaatgccgtcgtcttccagatcataatgcttggccgtgatgccgttttcccccgcagccgtggtttcaatcgtgccgttgttgaccacagtggcgttattgcccagtttgacggctcctttctgaccggcggaaatggtaccgttgttggtgatggtggcggacgtgttgatcatgtagcgcaggtcgatggcctgtttttccgttccggtcatcgtgccggaattggtcacgctgatcaactgtcccgttattccgttttccatgtcctggtccaggataagggcgctttttccggaaatcctgcctccttccattacctcgatctcaagggcggactggatggggtctttcaggttgacggcatttttggcgacgttcaggaatccggttcccgtgacggtcagtttgccctccgtcatgttgacggccttggtctgggcgtcgctgatggtctggtccgcaagggagggcgcggcaagcagaaccgccgcggccagggtcgtggctgtggaataaagatggtgtgccttcatggtgacaagctccgcaggttgtcgggagcgtcgccaccatgccagaacggacgcgtggaagggaaacccgttcgtgtaacaagtttgccacggggaatggcgcgaagcagggaggaaaggaagaaggccgcctaccgcaggacgggggcgcttttcacttccttcgtccatttcctgtacaggtccggggaaatttcggagggcttgatttccgagcgttcgccccagaagacggccgtatgcaggacgggaatgcctgaggcgtccagatggcggtcaatcgctgccttgtgttccagcacggcgtttttttccaggccgtgcaccacgcccatgatctgcgccccgccgaagatgtcccctccggttctccaatagcagtgggtcatgcagatgtggcgtccgcattccgctcccgcccggatttccatgccggcgggaaccgtccagtggaacagtccgttgtatttggtgacggggccgtcgttcgttttggtccgtacatgttccaaaaaggtggcgaagcggccgatgacctgcttccggtccagctcttccgccgtgcggcagtattcctccggttccaggccagcctgggcggcgcggagggcccaggggtcttccaccatttcctccggcctgagctgttccttgacggagaggagcaccttccattccagcccggagagggagacggttttcgtttcctgcatgggggccggttccggagtcttgtctccgggccggaggcccctgcggcgcatgtgccccacgcccagcgcaaaaacgccgcgggcgggcagcaggacatagtcgtccgcgccgatgtggcgtttcagtatctcgcagtgttcctccagcgtgccgcagcccacaggcaccttgaccgtggtccagagcctgtattgggcgccgggattggccgcatccgtgttgcggagcaccacgtggcccgtgaaggggtcgtgctcctttatccagtcaaaggccgcatccaggttcttctccggcagggaccatgccaccagggccccctgggcgagcttggtagccagcagcgtctggcgcacgcggcgcaccactccggcttccatcatggctttcaggcgctggatgactaccgggaccgggtggccgcattgctcggaaatggcatggaaggggaagcgccggaagcccttgacgcggtcttccgccaccatcaggatgtccgtgttgacgggatcgttcggagaggagggaatgctgttcatgacgggtcaaaaaaaggccgggcgatggtgtcgcccggcccggaaagccggagttggtttagctactgcccggattggtacagcggcttgttgtcgtaccgggcgtcgtaaatggcgaaggattcgcggtgctggttgtggtcgccgcggaagatcagccttccgctgtgctggcgttccagttccatgagcaggctggcgtcttcattcttgaagcgggagagcacctccgagtttacgacgatgaccatgtccccgatggtttccctgtatttctggatgcaggcgtagatctgccgctggatttccacgctcatggtcatcacggatttgacgcggccccggcctccgcagtacgggcacgggtcatgaacggattcccggaggctttcattgagccgctggcgggtcatttccatcaggccgatgggggtgatctgcagtacctgggtcttggccttgtcgcgcttcaggcggtccttcatggctttgtacacggcctgctggtccttcctgtggcgcatgtcgatgaagtccaccaccaccaggccgccgatgttgcgcaggcggagctgtctggcgatttcataggcggcttccaggttggtgtccagaatggtcttgtccaggtccttggtgcccttgttgcgtccggtattcacgtcaatggcgatcagggcttccgtctcgtcaatcaccaggtagccgccgcagggcaggagcacctggcgctggaaggcttcgttgatttgtttttcaatccccagttcttcaaagatgggcgtgcgcacggggaagtgctggatgtggcgcttggcgcggcgggagatttttcccgcaatggagcgcatgtgctccgtggtttccgcgtcgtcgcagatgatgttgtccacagtgtccgtcaggaagtcccgtgccgtgcgttcgatcaggtcgggttcccggtacacgcagacgggggcggggttggcctcctttttttcctccacgccgtaccattgctccagcagcatggcgaggtcgcggacaaagtggcggtagcgctgtccctgggccaccgtgcgcatgatgatgcccatgccgtccggcacgttcagcttctgcatgatctggcgcaggcgcaggcgttccttggggtcttcaatcttgcgggagatgccgaactggtccgtgaagggcatcaggaccaggtagcgtcccgccagggagacgtttgtggtgacgcgggggcccttggtgccgatcgggcccttggtgacctgcaccatgatttcggagccgatggggtagatatccggaatgtccttggacgtgattttgcgctgctgcttctttggccgtccttcgcgttcgatttcttccaggctggagtccagcgcggcgggcagagcgtcccagaagtggaggaaggcgttcttttcctggccgatgtccacgaacatggccttgaggcccggttcgatgtttttgacgcggcccttgaagatgccgcctacgatgttgtcttcgccttcgcgctcgatagtgtattcttccagtacgccgttttccagaagggctacgcggcgttcgagtttctcggcattgatgatgatggtggagccttccatgggatcacaggatccgaagccgaaggctcgtttaatttttttaagcatttttgtaaacacggggtgtgaataagctagggtgtgctattgcccgcaatgttcccggagggccgcctcccggcaggagcggctggatttcaagctgtggagatggccggaaaggaatcatgcaggcagatgcgttgatgtgatgcggcagtacggcaggcgcaaggccggagcgctggctccggaggttccgtcttcagtcttccgcgtcagtaacattagtgaagaagtccagttcctgaagggcttttccggtaccttccgcaacggcgctgagcgggtcttccgcaatgtggatgggcaggccggtctgctcatgaaggagctggtccagtccgcgcagcagggcgcctccgccggctagaacgatcccccggtccacgaggtcggcggccagttcgggggggcagcgttccaaagtcgtccgcacggcgtcaacaattgtgttgagttgttccgtgagcgcttcgcgcacttcttctgatcggattgtcactgtcttgggcaggcccgcgaccaggtcgcggcccttgacctcgatagagagttcctggggcaggggataggcggagccgatgcggattttaatgtcctcggcggtgcgttccccgaccataagattgtaggttctcctcatgtaggagataatggcgtcatccagctcgtccccggcgcagcggacggaacggctgtaaacgatgccggagagggaaataagtgccacttccgtggtgcccccgccgatgtccacgatcatgttgccggcggcttcctggactggaaggcccacgccgatggcggcggccatcggctcctcaatcaggtgcacgcggcgcgctcccgccgcttccgcggattccttgacggccctgcgttccacttccgtaatgccggagggaatggcgatgagcacgcgcggcttgatcaggtaatacctggccgtggcttttttaatgaagtaacggagcatttcctccgtgatgtagaagtcggcgatgacgccgtccttcagcggccggatggccgtgacggagccgggggtgcggcccagcattcgcttggcttcgtcccccacggccagaaccttgtctcccttgacggcgacgaccgagggctctcgcagaacgatgccctggtccttgacgttgaccagcgtgttggcggtgcccaggtcaatgccaatgtcataggagaaaagtttgacaattttctgaaagaaagatgacataaaaaactagtggataaaggcgtagccctgaaacagccggggggaggaacgccacactttttccttttcacgggactgaaagcctggcacccggaccggggctgcgggataatcccgtacaggacgaatcgactatgaaaaaacatgccttccaggtcaagcggaagatgcgggatgacatatgtatttgcattatcagcaaggatgtactatatgaatgaaagatggcggcagtgtttccccgtatatccaaattacattcacctattccatttatgaaagtcactactatcctgacggcggcggcatgcctggctggttctttctctctttatgcggacccggctgcggacagggaagaagctgcgtcatccacgggagcctattccgtagcaggagccctccgcctgcctgaaaatacgaccaagagggatgtctacggcatgaacgtgggctggaagctgttcaagggcaaaaatgccccggaaggagtgaacagtccggactttaatgattcttcctgggaatccgtgaatcttcccaacggcattgagcttcttccggaggaggccagcggctgctccaattaccaggggccggtgtggtaccggaagacgttcacggccccggagaagctgaaaggcaggaggaataccctgtattttgaaggcatcatggggaagagcgaggtttgggtgaacggggagaaggccgcggagcatttcgggggttatcttcccgtcatcgtgaatctggacaagtggctgaagccgggccagaagaacgtgatcgtcgtgaaggcggacaattccaacgacgggtcctatcctcctggcaagccccaggaaagcctggatttcgcctacttcggaggcatttaccgtgacgtttacctgatttccaccggtcctgtctatatcacggacccgaacgaggccggaaccgttgccggcggcggagttttcttccggacggaatcccttgacccccgtacccgcaaaggcagggtgggagtgaaggtgcaggtggccaacgatacggacaaggaacagaaggtgcgcgtgcaggcgctgatgacggaccccaagggcgtggaccccgtcggagagaccgccccgctggtcattccgccccattccacgggtgaagtggatattcccctggtgatctccaatgtgaagccgtggtcgccggacaatcccaacctgtacaccctgagcgtggaggtatggaacgccgccggagggaacaatgccaagaatccggcccatctgctggacaaccgctccatgagggtgggcgtccggaccgtggagattacggaaaaggggctggtgctgaatggctccctgttccctgaaaagctgattggcggcaacaggcaccaggatttcgcccggctggggaatgcagttcccaacaacttgcaatggcaggacgccgtgaagctgaggaaggccggcatgcgtgtaatccggagcgcccattatccgcaggatccggccttcatggacgcctgcgaccgcctgggccttttcgtcatcgtcgctacgccgggctggcagttctggggcaaggggccttttgcggaccgggtttatgacgacatccgccagatggtgcgccgggacaggaaccatccctccgtgatgatgtgggagcccattttgaacgagacccattacccggcggatttcgccaagaaggcccgcgacctggtgcatgaggaatacccgtataagggctgttacaccgcttgcgacgcggtggcccagggcaatcagcattatgaggtgctgtacgcccacccggccacgggggacaagcactggtccatcaaggaacggaaggacaacaagccgtattttacccgtgaatctggggataacgtggatacctggtccgcccataactccacctcccgcgcggcgcgccactggggtgaagtccccatgatggtgcaggccctccattacctcaagacctcgttcccgtacactacgtatgataccctgaacgccgcttcggcctaccacttcggcggttgcctgtggcaccccttcgaccaccagcgcggctatcatccggaccctttctacggcggcattctggatgccttccgccagcccaagacctcctattacgccttcatgtcccagcggccccagaagacgcgcaatgagctcggctccggtcccgtggtgtacatagccaacgaatgcacgcctttttctccggaagacgtgacggtgttttccaactgtgattccgttcgcctgagcgtcaacggaggcgcgccggtggaaaagaaggtggcttcctaccccaacggcctcaagcgcgttcccgtcgtgttcccgaaggcctgggatttcatggaaaacaagaagctcgcccgcgccggcaaggaaggggcggtgaagctggtggcggaaggcctgattggcggcaaggtggtgaccaggcatgaagtgcggccctcccggagggcggaaaaaatccgcctgagcctggaccgtgaggaaggcgtggagctgtgcgccaacggttccgacgtgtttgcggtggtggcggaagtcacggacagccgtggaacggtgaagcgcctgaatgatgaagagcttgtcttttctgtggaaggtcctgccgaattgctgacggattcaccggacggcaccctgacccagcccgtcaagtggggctccgctccggcgctggtgcgcctgggcgccaagcccggaacagtgacggtgagggcctccgtgaagcatcccggctctcagaaacccgtttccggcgtcttgaagtttgacacgaaggctcccgggctgaacatgctcttcacggaagatgccgtaggcaaggcgaagaagggggcggctgcgccgtcttccgcagaggcgcctgcttccgaacgggaaaaatccctccagacggagctggaaaaggtgcgccatgagcttaacaagctgcgcaacgacaaggtgagcgcccagcaaagccactttgaataaccggactccccgccatgctgagagaaaagatcatccgtttctgcctgctcctgctccggctggggatggggggcttttttctctttgtggcggggcgcaagctgttccacctggaccagctccaggcgactattgaccggttcgccattttcccggaggcctgggggcatcccctggcctgcctgggcgtggcgtgcgagatcgtggtgggtctgggactcctcttccgccggacctgcgccggcgccgcgctgctgggcagtgcgctgacgttcacgtttgtagccctctttgtgcagggctggatcagggggcttgccctttcctgcaattgcatcggcgtggaaagggaagtgaccagctatccctttgaagtggcgtggaggctgggcctgttcctgctgatgctggtcatcctgtggaattcctgccgcaaggggaagacatacttcaatgtgacccggctggatttcagcgaaatgtgaccgatgggaaagggcgtgcggccgttttcaggcctggaacgtttctctgggaatacattccggggagaaggatttccagggaccggaagacccttgctccctgaaggcagtttcgcgtgcacgccgccgcattcatatatgcttggagaacaggctccctttcccggaatgaaggtttgatccgttcattcttcagatttactcaccctgcgggcttcaagctgcgctttccgacctgccggtttgtccggtttcccgaccttcatagcctcattttaccaatgaacgccgccttccgtccaatcgggttttcaccgtttcttgagaccggtgttcgtcgtggaaaatttccttgcaggggcagggaggcagggtatcgtccggagggatggagaagcctgaagcccgcaggaaggaggaacccgcaggccggcgcatcaccctccgcttgttctccggcgcgaaccctgtgcacatgccctggctgccgccaaaagaaggcgcacctttcccgggcgcctttgccgccgtactgtcttacagcttgtggccgaaggtatcttccggcttcagggatttgatcagttccagcaggagcttgatcgtgttttccacgtccgtaagggcggccgtttccaccggggaatgcatgtagcgcaggggcagggataccagagcggaggccacgccgttgcgggaaacgtaaatgctgtccgtgtccgttccggtgcggcgtccggcggcttcgtgctggagcgggattttgttcttgtcagccacgatttccaggcgcgccaccaggttggggtggttggccgtgccgtggatgaccgcgggaccgccgcccagcttgatgtctccgaatttgcccttgtccagtccgggggagtccgtggcatgcgtcacgtcaatgcagatggccgcgtccggacgcaggcggtgggtgatcattcccgcgccgatgcagcccacttcctcctggacggcgttgacgagcatcacgttccaggcgaggggctttttcagcttgcacagtttccttgctatttccgacaggacgaaaccgctcaggcggttgtccagggcgcggcataccagcttgctttcattcatcagcatggggccgtcgcaatagacgcccacatggcccacgcgcaacccgagttccgccacctccttgtcggaggatgcacctacgtcaacgtagatttcccagattttaggttccttttccccgggttcccgcaggtggatggccgtgtttccggttacgcccgttacttccccctgggagcccaggaagcgcacgcggcgtccgcgggcgatggccgtatccgtgccgcccacgcgctccacgtaaaggaagccgtccttggtgatatggcggatcatgaagccgatttcatccgcatgggcttcaatcatgagcgtgggagcgttttccgcttccgcgtggaaggtggcccaggtgttgccgtaggtgtcgcactggacgtcttccgtgtacttgcgcagctcgtccgcccagattcgctgggcgtctatttcaaagccggaggggctgggagtttccagaagttccgttaaaaatccaagactgtcgtcgctgatcttcatggcttttgtatagcaccgttcccgtatccgctcaacaggaaagcatggctgccggcggggagatgttccgggagggggatgaaaaagccccgcctgcacgggatgcgggcggagccgggaaatggttttcagccggggctaggcctgcttgaccggagaaagcccttccaggacgttctgcttgtccatgatatagccggtgtccggatcatggtactgcgtggagtaaacggatgttctggcgctcccgtacgggtccgtttccttcgcgacgggaagacggttgctcagggaggggaagcactgctccaccagttcaaaggtggtgacgggctccggcaccaggttgacggagaagattccgcattcccatgccttttccacatccctgaccaggcggttcatgggatagagctggtggcgttccagcagggccgcttccagttcttccgttccttccggggcggcggccagcagatccgccacgctcatgtccgctcccgttccggtgacttccggaaggtagacgttcagcacgcgtccgaaccggaggttgatgaaggctttcatttccaccagcgcggcaagccattcatcttccggttcgcggagcaggggggaatgttcattgcccgtttccggctgggtgtcaatgcaggtaacgtaggttacccgttccgccttcacctcatgcaggaggtcgatcagggttttaacctgcgccagaaaaggggccatgttctgccggatggctctgcgcccttcccggagggaggggcagatgatcacggcctgcccgaattccttgccgcgcagcagggacagattggtttcatcaatcaggtagtcgaagtaccgttttgaggaccagaaggcgccgagggcgcaggaggaaccgatgagtgccgtgtctgtcatggggaggtgcggaggttgggcggttgagtgggatggtgccgttatttcagggcgtcaaaggcggatttgaagaggaagtatccccagccccagtcttcattgccggcccagtccttgtcatagtggtggcggggcagcaggaagcgttccgggtggggcatcaggcccatggcgcggccggtggaatcctggaggcccgcgatgctgcattcacagccgtcgcggttgtccacgtactggagagccacatttccggcagccaggtatttttccgcatctccggggcgggtgaccaggcggccttccgcgtgggcggagggcagctcgaattcatccggaaggccctggaggaagggtgagtttttagctaccttcaccagcttggcccagacgcattcaaaacgttccttcttgttgtcaatcaggctggaatccggcagaatccccagcttggtgagtatctggaagccgttgcagatgcccaggagcaggccgcctccggcatggtgccggtgcagggcgtctcccaggaagcgttccgtttccagctgggccaggcggccgctggtgacgtagtccccgtagctgaagccgccgccgaggacgacgagctgggatttggcgacgtgttccggcgtggccgtggcgatgggctggatctgggtggagaagccggccgcgcgcagggcgcgttccgtttccgcgtcacagttggtgccggggtatttcagtaaaagtgcgtgaggcatattggtagaaatgaatcgttggtatggttaggtcccggtttttggaaatcaataataaggggtgagcccgtctttccagagcttcttgagtttggctacgtcgcagtccagcaccttttccccgccgcagcaggtggcggtgaggcgcttttccttcgtgacgctaccgatgcaggcgcaggggaagccggccatggccgcttcaaagtccgcggcgaattccgggtccacttccaccaggatgcggcccgtgctttcactgaacagggggactgccggggatttccatccgttgacggtcggcgccttcgtgaggtccagccgtacgccgcccttgccggagaaggccatttccgccgccgtgacggccaggccgccttcggagacgtcgtgggcggagagcaccaggccggaagtcagggcgttgtaataggccttgtacagttctatgtttgctgcacagtccgtttgggggaccttgccgtcttccacgccgtgggtgcgtgcgaaaacggagccgcccatctcgtcttccgtgtggccgatgaggtacagcaggctgtcgttccgccgcagggaggagccgataacatggtccggactttccaccacgccgaagccggagcagaggaaggtgacgggcacgttgatggggccgtcttccgtttcaaagtagttgtagaaggagtccttgccggagatgaagggggcgttgtacgcgtccgccgctctggcgatggccttcacgcattccaccaggcggccgagttccgccgggtcttccgggttgcccatgcagaagttgtccagcaggccgatcttgtccgggttggagcctaccaggatgagctggcgcacgcattcgtccacggtgccggtgcccatggcgtaggggtccgtcttgccccattccggaagaatggcgcaggccatggccatgcacttgtccgagccgtcgatgtccaccacggagccgtcctgcggggcgtccgcctgtgcgcccgccaggggcttcagaatggtgttgccctgcacttcatggtcgtattcccggatgatgggttcgcgggagacgatggcgaagtctcccatgacggtttccagggatttgttcaggtccttgtccgggaggggcaggcccgtgaggcccttgccgggggtgaagacggattccagcttcttgatgggggcgtcatgcagcttggagttgtccaggcagcagacgagttcccccttgtgccagactttcaggatgcccgtatcgtcggaatggcccaggacggtcagctccgtctggaaggtgtccgccagcttctggagctccggcaggtctttttcctccacggccaggaccatgcgttcctgggattccgacaggaagatttcccaggagatgaggcccggttccttaaggggtgcgttgtccaggaagatttccccgcccgtgacggagagcatttcaccggcggcggaagagaagccgcccgcgccgcagtccgtgatgaagacgatgaggccgcgttcgcgcgcttccagaataaagtccagcgttttcttttcctcaatcgggttgccgatctgcacggcggtgaagtcctcttcgtgggaggcttcgtccagcgcggcggaggagaaagtggcccccttgaggccatcgcgtcccgtgcgtccgccgatgacgatcaccttgaggccggggcgcatttccttcaggatgtccccgcggggaatcacgccggcggttccgcagaagacgagggggttgtaaatgtacgtggggtcaaactggatggcgccgttcacggtgggaatgcccatgcggttgccgtagtcgcgcacgccgcgcaccacgccgcgcatgatgcccagggggtggatgacgtccggagcggtgatgtccgccgggtccgtatccggagcgccgaagcagaagacgtccagggaggcaatgggcttggcgcccttgcctgcgcccagaatgtcgcggatgacgccgcccagcccggtgttggccccggcatagggttcaatggcggaggggtggttgtgcgtttccgccttcaggcagacggccagcttgtcgtccagggcgatgaagccggcgttgtcgtcaaacgcgctgagcacgaagcccggcttgcgttccatgatcttttcggaaggcttcttgatgtaggtcttgaagaggctgtccacggtttccggcgcgcctccgttgacgctgtggctgatggaggcggagaagatgcggtgcttgcagtgttccgaccaggtctgggcgatcacttccagctccacgtcagtggggtcgcggtcgatttcgcggaaaatctgctggacgacttccatgtcctcgcgggacagggaaagcttctgctttttgctgagttcaagcagttcgtcgctgctcaggtccctcacgggaacggtgcggtaggttttggcggacatgtggatggggaaggagaggggttaggcgatggtccagttgtgaatggcggggttgcagacgtccttggcaaagcgcgccgccagggcttccttgtccccctggccgaagacgtacacgcgctgggtgattttcaggccgtccagggtaaagcccatgttctggcggccgcggtagttttgcaggatggcttccttttccaggtccagggcgccggccttcatgccgtagtcaatcgtgaacagggagtctttcaggatgggggcggcctgttccgtgcattcctgggagatggggtccaccagtacactcaggagatattcgcgggctttttgttcgtccccgctgatttctacggtgtaaacgcggctgcggcggaaggtgaggccggcattcaggggagtgtagagcagtgcgtccgcgttggcggcggcctggaaccggctgataacttcaaagtggagggtcatatcgctcaagaatgttggtaaaatgaaaaatgggggccggtcggacaaccggctcccatgaaaggggaaagggctcaggccttgttctggagccgggagaggacttcctcgtaggcttccatcacgttgcccaggtcctggcggaagcggtccttgtccatcttctcgccggtcttgatgtcccacaggcggcaggtgtccggggaaatctcgtcagccagcacgatctgggagggatcttccgccagacggccgaattcaatcttgaagtccaccagcgtcaggcccacctgcttgaagaaatcaatcagcacgtcgttcacgatgcgggcctggtccttcaggaaggcgcattcctcttccgtggcggcattcagttcacgggcgtaatcatcattgatgaagggatcgcccaagtcgtcgtccttgtaggaaaactccacgatcggcttcttgaagggggtgccttccttgacgcccatgcggcggctgaaggagccggcggcgatgttgcgcacgatcacttccaggggaaggatggaaacctttttcacgtcgatgttgatgtcgtccacgtccgcgaccaggtgggtcttcacacccttgctttccagcatgcggtaaatgaccagggtgatggccttgttcatcctgcccttgttttcaaactgggccttcttggctccgtttccggcggtggcgtcgtccttgtattccatgcggaggacgttgggattgtcagtcgtataaaggcgtttggccttcccttcgtaaataggttccatgatacgtgttgcgcagggttgaatgcgtgcggggatgttacgccagacgttccgcacggtcaagccgcaactggacgaaggaagggggcgcctccgcacgcccttgcggctatcccatggggaaggaattgacaagggccatccaaccgggcaaacccggttttccggtctctggactcgggtcttttccggagagccacggaggtgaatgtctgaaatccggcacaaaccggcggccattattcttctgaatgaaaaaagcataatcaacttgccacctgtttccgcggatgttaggaagatgattgatgttcaaactggctgcatgtttctggacggctctcgctctcacacttccgtcccgggcggaggacacctgccattccgatgttgaaagttggagtactctaagatgcccggttcagtattttgccgtggaatcccagaacagccgctattggacgaccctttttccggacaatccgccctttgcctatgcgtgcctgtaccttccttcgtttgaccgtgaattcggcttttatctggacgggaacgaactgtgctgggccagagccatcgggccatgcagcatgcagatgctatcccagtttccggtggcggatttccggagtcccgggatgaaacaggctgccgtgctgctgacctgcttgcactttcccgttttagggaatcttttggagggatgggactgtgttgccgataccgtaacggaagaagacccttttgccgggcgtaaaagaaatatggttctgaatttcctccaattccgggaatatcgtgagctctctgccgcctgggtggaggccgtggtcaatcctgttctttacagtcgcttatttgttaaaagaggccggacggcattaaaccctgccgtagcggctgaacttcgcaaaacgtgggatgaagcggtcactcgcagaactttccccatggacctgtaccgccagtacgtgaccgggtgcgacgggaattactgctacttccgcggggagtccggcgctatggcggaagacctgtgccggggagaaggcaggatgaggccggccatgaggtttctggcctggggattggcagacatggccatgatggatgatttgaccccggcaggggagcaatgggtgatgaagcagtgcgccgccgtccggaagtatgccgcagaagcgggtgacgagccgcctcccatggtgtccagtgaatgggtggagggattcagtaaacgggtttggaaacgaatggagcaggaggaggccgcccgggaacgggaaaaaagcatgcgcggggagtttgcagctgcggaagaggagccggaagaaaaagcgccctccccgtattcgggagaaaaatatgtccgtgggttccgggagcgttttctgaagcctttgggaacaaatcccctttggaaggatttgttcccggcggggacggaggggaagcccgccgtgtgctgtttgcttcccgggcgcggcatctgcggtttttatctggatggccccctcatggggcgtgcggaatcccagtcacatcatccctgggaggtttatgacagctggttttttcaccgggtaccggaaagggagttattcccttatgagggcattccggatgcggagggggattgtgaagccagggtgaagagggagtggctcatcgtcgggagggagataggcggcatgatggaagggttgctcaccgggattgccaggggagagctggtgtccggaaaagggagaacggctcatcacgtggacgataccggcttttgcatcgtgcgcggggctgacggaacggagaggatcatgtctgccgctgatgctgatttgggaaccgtggtggagctgatggatttattgtataccatggacctgctgttcacttgcgatgaggattatttgaagggaattattgagaagcgtgccgtgctgcagggaagaacgccggaggaaggggcgcgggaatatcgccgtgaaagcggcctgtggagcagcaggggtggccgggcctggtggttttaatccggggccggggggattttccctgtgtcttttccggaaacgtccgggctagggctccgcagcggaagggccggagatgaattgcctttattaacttgcccatggtattctactggtttaaaaaaatactgatgttcaaactgctgctctgcttctggatgactttttcgctggttccttttccatcggcggcagatgaggaggtagaagaaggaatgactctcatttacccggcccaatatttcgcatgcgcttgggaagaggcctattggggtgacgccggcgtttattgggaaatgcttttcccggaaaatcccccctttacgtatgcctgcatttacctggggtcctttgactaggagttcggtttttatctggacggaacgctgatggttcgggcttcttccctgaatttgaatcctgcccagatgtattgcaattggttttttgaaggaacccctgaaaggcgccttattccttatgaaggcgaaccattctggatggatgccgggggcgtgggccgggattattcacccagggtgaaacgggagtggatggatatggggaagggtttgtcccggctgatcatccgggtcctggaccatgccgcttccggggagattgccgccgggaaggcggcgggggattcagacccggattccctggacatggtgatcatccgcgggacggacggaaaaaacaggatactgacgccgcaggacgaggggtttgaaaccgtggagaagctgctggagtgtgcgtacagcgcataccaggacgaaagcgtgaaggacagtgcggggtatatcatgaagcattacgatgtgttgcgggggaagactccgccggcgggagggtgcccccgcaaagagtgctttggaatcaatgggagccgttttgactggtaggcggaaggggttcaggcagcccttgatgcactggccgtgtgcctctacgggaatttagtcttgataccggtaggggtgcgcgtatcatgcgctttagtatgcacgccgacttggagaaattattgtctctggggaaaatcaccccctctctcgctgaaaaacttgatcgcatcgcacctggccgttactgcttccatactacctggggcgccggcaaagtcatttcctggaacctggccgccaaaaagctggttattgattttgaggaaaatccggaacacgaagttgccttggaatttgctccaaaaattttggagttcctccatgatgaccatttcctggccaggcgttatgaagataccgaatccctgatcaacctgtccgtggacgatccggtggaactggtgcgcgtcaccttgcagggctacggcaattcccttaccccggaaaagctggaagccgcgctgaaaggcaccgtgattgccgcggacaaatggaagaactggtgggacaaggtgcgcgccatgctccgttccaacgtccagttcatgatgcctacccgcaagggagagcgcatcacgctccgcacgaatattctttcccgcgcccaggctgccctggaggattacaacaaggccgcggacctgaaagccaaggtgcgcgtgctggacggcatcaagatggaaacggtcatgacggagccggacgccgtcaacgccctggttcaggcggtggacgccgacgtgcgcaacggcggaagcctggctcttcagcaggtgctggagctggccgtgctccgggacgacctgatcgccgccgtgaagaacacggaagcggcccaggccgcctaccccctccgttccatcgtggaagccaatatcggcgatgtggaacgcttcgcggaagtgctcaattccatgcccgccgtgcgccagaagcgcgtgtacgttacgctgcccgccgtctttggagaagagtggacgcagaaggcgctggagctgtttgacgcgagcggcgcccgcgccgtgggagagattgccaagttcctgatagaggaagggcatgacaaggccctggtcaagcatttgaagcatgaactgctgcgccagactcttccggctgaatccctcatctggatatgccgccagcggcatgacgcctccaagcccctcttcggccttcccgtcggcattgcgatgctttccctgattgaacaggaccacatggacggcggccccaaccgcatgctgcgcttgaaaaacctgtttatggaggacaagaacatcatccaggaaatgatcaaggggcaggacgtggcggaagtgcgccagttcgccaagatgctgtacaatacctccgccttctccgaacaggaccgcggtgcgctgatggcccgcgtgatcagcgtgttccctgacctgcacgccatcgtgctggacgccctggtggatacctccgacaagccggaaccgattttcgtttcctgggacagcctggaagcccgcaagaaggagctggaagagctggtgaatgtgaagattccggaaaacctgcacaacaagaagatttcccgtgcggagggagacctccgtgaaaacggcggctaccaggatgccaaggaagtggaaaaggtgcttaaccgccgccgttccgaactggagcaggcgctggcgctggcccgcggcacggactttgccgtgacggatacctccaaggccgccatggggatgaaggtgaccctccagcccctggccggaggggatgccgtggtgtacaccattctgggcgcgtgggatacgaatccggaaaagcacattgtctcctatctttcccaggttggcaaggagctgacgggcaggagcgtgggagaccaggtgaagatcgtgccgatggacggcgacaagaagaaagtgttcaccattacgaagattgaagccgctttttaatttttaagagagttgctttcccttttgactaaggcctttaaaaaggctccccatcctgaaaggaggggagcctttttgttgttcatggaaaaactttccattgtttcacggatttagaatccgtggtcaacaaaaaagaccagagttcggattattatttcattagtatgaatgccttaatcaaacagactattgtttgaatgggctggacaatctctccggcaaagattcatttttcaaggcacaaaaaataaaacggcttattttcaatgagatgcgcagtatattttttcagattttcttctaacattcataacggattctaaattcgttatttgtcaagaaatggaagcggtgtttcatcatttccaatcacatatcccattgacaccatgaagaaaacattattcattctggcaactatggttgcggcggcggtggcggccgaagcctccaccgttctgatctcgttcgggatcaattcaggcaatggcaccgccgttgtggacggcacgtatctgggagaacccggacagaaagtgaacaagatttccacgggacagagtaattcctatacttccggaaccttggtcactacggggggaggaagcaccggaatcaccctgacgacgggaggactctgctgcggaggtcccggcgccatgaccgatgccgctgccaaagggtccgccctgggccagggcaacaagttttacgatgttttcggccaggatatgactaccggcaatccgatggggggcgcgatcaatccgataggctccgcgaacggcaatttcacgatgtccctgaacaacctgtccgccggcacctacacgctgaccatgctggtgggacgcggaaacaattacggtgcgggcaatccttcttccttcagccttgacggcaccggaatctccaacatttccgccagcctggacgactactccaccgggtccggcgctacgctgaacggcgccaccgtcacgggcaacacgcataccggagactggatgctgattacttacacgtttgacgtggcggcggatggcacccggcttgatatccagtcccagggaggtaccggcaacatcaatgccctggcgctgacctccgttcctgaaccggccacggccagtctcggcctgctgggcctgggcgctctgctgatgcgccgcaggcgcgcgtaacgtttgtttttcatgcaggcgctggccgttcgcgaaaggaacagtcggcgccttcctgtttacggaagaggaaatcgccatgagaaagctgaattggtgcggatgggttccggctgtgctggccgcctgctccctggcgcatgcggaagaaatagggataggagtgctgaacggaactgcggccacggaggcggcgttccggcaggcggagcccggaaccctggcggaggaaggaaaaacatggaatttcatcaagcctgcggcgaatgccgctacgaccgtttcctccttgaaaactgcggcgggagtgtccacggaagcctcctgcgccatcaatccgggttattgcgccagcaacggcatttttgcgtcgggcaggaaccgtgattatttgctcatggattcctgggccggtatccggggaacggaaaacgtcgtgatttcccggcttcccgattccatggcggaatactgccatgtggaaatttacggggattgcaatgactcggaccgggacatgctttatacggttaacggcctcaccggcaccatccaggaccgcggcacgttttccggcgcgtttcaggaaggaggcaacaagctgacgctgaagtatgtgccggtcaccggaggaacgattaccattacgggcaacggggcctcccaaacgcgttccgccatcaatgcggtccgcctgacggctccttctcccggcatcgtgacttttacggcgactccttcagaggtcatggaagattcaacctccggagccgtcctgagctggaaaacctggaagtgcggagcggtcacgctgagcaccagggacggccgggatattccggccactacggaagacggcacgggttccgtcacggtaaagcctgacgccaccacgacctacattctcagcgccgcctgtgaggacggaaccgtttccaaggaagaagtgacggtgaccgtcaggaagcaggaaccggaaatccttctctttgaatccgacaaaaagagggttgctcccggcagtgatgagaaagccactctgacatggagcacggtgaaagcggaaagcctcgccctgaccgccaatggcgcggagattcccatcaccagcacggcgggagccggcagtgttcaggtgtctcccgcggagacgacgcagtacacgctgacgctgaccgcggcggacggcacggagaagagcaagtccctgattatttccgttctggcggagaacacgcccaacgtcctggtgttcctggtggacgacatgggctggcaggatacgtccgtgccattttattacaaggacggccagcccgtcgttacggagctgaacgccttttataaaacgccctccatggaaaggctggcggcgcaggggatgaagttcacgaatgcctattcgtgccctttgtgttctccgggccgcacgtccctgatgacgggcaagacctccgcccgtcaccgggtcaccaactggacggccgtgaatgcccccacgctgaatgaatacagcggcggtcttccccacatccgtgctccccagtggaacatggcagggatgagccagcaggaaattcctctcccccgcgtgctgaaggatgccggctaccggaccatcacggtgggaaaggcccacttcgccccgtccaaccagctttattccaatccagccaacctgggatttgacgtcaacatagccggctgctccgccggacagcccgcctcctaccggggagaggatcagttcggctccgggaacacccatgttcctgacctggaggaatattacggaaccactgcggcggaagacaggaagaggaatttcctgacaaatgccctgacgctggagatgaagaagcagatcaaggccgccgtggatgagaatgcgcctttcttcgcgtacatgacccattacgccgtccaccagcggcacgaccagccggaccccaacggggactacgatacttatccctcgggcacgtcctttgaaccgggagtttccattggcggcaatctccgcaatttcggcaccctgatcggcggcatggacaaatccctgggggatctgatggattacctcaaggaactgggcgtggccaacaggacgctggtcattttcatgtccgacaacggcggagacgctcccatccagcagagctatagcggagatattccatggcttgagaaaatcagcgccgtagctcccctgagagggcgcaaaggcagccgttacgaagggggaacgcgcatcccgatgattgtgggctgggcggaggccgattcctccagccccatccagcaggaatatcccattccgcagaattccgtgaaccatgacatcgtggcgatttgggacatttatcccaccattctgagtatgctgaagctgaaggttccggtgggccatcaggtggacggggaggacatcagtccctatttccggggggattcttccttccaccgcacccagaagatattccagcatttcccgcaccaccattcctacgccaatttctattccacctgccggaaaggagactggaaggtcatttacaattacatggaccagtacgcccatacggatttgtattccggcaacggctacaggaccgcgggccgcttcccgtggcagcttttcaatctgaaagacgacatcggagagagcaatgacctggctcaggacccggcgcagcaggaacgcctgatgcgcatggcgcgctccctgatccgggaactccgtcaggcggatgcgcaatatcccgtcctcaccaggaacggccaggcggtggggacggcctacatccgcatgcctgatttcccggatgtggattccgacggcgacggcgttcccgaccttgtggaggacgccaacggcaacggcgtcatcgatcccggtgaaacggacccggatgatgcttcctccttcgttcccatccggcaataaacttttcaccaactggacaagactcatgaagaaaacacgttgtttttccgttcttcccggtcgtctgcgtcttctcaggattggccttgggtccgccgccttcctctccggggcccttctgctggcggatgtgctggtcaatgccggcggcggctccagcaatgcggacaagacgggcaacggcggcggcatattggattacgggcaggtcactttttccggctccgcctcctatgaaaataacacggtgcgcggcttctcccagggcggagcggtttacgcaggttccgtagtccagcaggccgccgtttcctttaccggcaacagggcggagggcggcagcggcggcgcgctctacagccgcgggaacgtgcaggtagcggcgggttcctccttttccggcaacgcggcggcccacaacgggggcgccctgtgcctggatgccaatgacggggaggaggagcgcaccgtgaacgtggaaggcggctgttcctttaccggaaacagcgccggaaacctggggggcgccgtttacgtttccggcggcagcgcggaggctcccaccgtgctcaacctccggtccacggattcctcccgccccgtttccttcagcggcaatttccgggggcgttccgcgggagcctccacgggcggcgtgcccaattccatcacggtcatgggccatgtgcgcctggtgatgcatgcggacccggattgcctggtcagcatggaagaccctctttattccttcgccgggtattcctccacctccagcctgagaaagacggggggaggaacgctgggcttaggcggcatttccttgtgccattttccggtgagcgtggaaggcggaacggtgcggctcggcacgaacgccggcgtgcgcggaatgacgcggctggacgtggccgcaggggcatgcctgtccttctctctcccccggaaccctagccaggaggccaagtggagcgcggaggggccagtgtctctggatagcacggcggaaatccgcgtggctctccctgtcatggccgggaaggaacaggaacagagctggaagctggtggaagggaccactctttccatggcggctcttccctccgtttcctatgacgccgccagtgcggaagcctggaagagtgagggttctttttccctgaaacaggagaatacggcgggaaaaagcgccctggtgctcgcttggacgcgtacgccttccccgtatgaccaatggaagaaggaccattttgccgacggaacgccggaggaccagactgtcccggacgcctgtcccgcgggcgacggcatcaccaacctgatgaagtatgccgcggggctggacccgaacaagccctgcggaagcgtcacgaggctggcggtcagggaggaaaacggggaatgccgcctggtgctggaatggtcggtgaatacggcggccacggacgtgacgttcagcgtggaaagcacggaagacctggttacctggagggaggaagcgacggtcgagccatccggagaccgtgccgaataccttgattccatagtgattgacggcaacgcgccgacgcggcggttcctgaggctgaaggtgtcgcgggaataaggtgaaggctgtccattttttatcctgaaccgcctggtgagtggatccagaggatgaatgatgcaggccttcctttccgggatgccggaggcacaatccccgcggcatgtggaaatagccaggtttaatgggttggccagttcatattcatacggagaaagacggagcttgcgggcagagggggtgttgggtggggtttcatcaacccttttccgggggatgttctggcgggtcatgaaaaagggctgttccgccggatgcgggacagcccctgaaaaggaatggcggttaaacgccgcagattatttggagagcaccttttggacggcggcaacgacgttgtccacgttcatgccgagctcgtccagaacttgcgctccgggtgcggagaagccgaagcggttgatgcccacggcttcgccctggcagcccaggtatttccaccagaggtccgtgacgccggcttccacggaaaccctcttcgcgcaggaggagggaagcacgctttcccggtattcggcagactgcttgtcaaagcggaagaagctgggcatggaaaccacgcggattccttctccggttttttccgccgccttcagggccagttccagttcggaaccgctggcaaggataatggccttcaaggttccctgttccttccgggctacgtagccgcctttcagcacgccttcccggcgcgtttccacgggaatattgttcagggtcgctaccttctggcgggtcaggatgagggcggtggggccgtcggcgcgctgcatggcggccatccaggctcctgcggtttcttccgggtccgccgggcggatgacgtctaggttcgggatgacgcggaggccggagacggtttccaccggctggtgggtggggccgtcttcgcccacggccacggaatcgtgcgtcaggatgtaggtgacgggcaggccgctgagggcggccacgcggatggcggcgcgcatgtagtccacaaagacgcagaacgtggcggcgctcacgcggaacaggccgtcataggcgatgccgttgcagatggcggccatggcatgttcacggatgccgaaccagaagttgcgcccttccggggtttccgcggagaagtcccccgcgccggaaaggtagtttttattggagctgtacaggtccgcgctggtggtcaggaaccaggggtccgccttggcgatggcgttgatggcgacggctccggcggaacgcgtggcgtcgctgtagtcctgcgggaaggcggggatggccttgtcagagtccgcgggattgacgcccctggcgcaggcgcagatgccggagtccagttccgcggccagttccggataagcccggcgccattgttcgtaggtggcgttccaggcgttgaaagcttcttcccgtctggccttgaggtccgtgaaggcgctgcggacgtcttcggagacgtaatagcgttccccggcaggaatgccccagttggcgtgggcttcttcctggagcttggctccgccttccccgtggcccttcgtggtgccttcaatgccggggatgcctttgccgattaccgttttggcgatgatgagctggggcttgccgttcctggcgtttttggcggcttccaccgcttccgcgatggccttgaggtcgtgcccgtcgatctggcgcacgtcccagcccagggcttcatacacggcgcgcgggtcggcaagctgggtgcgttccgcaggggcgtccagcgtgatgtcgttggaatcgtaaatgagaatgaggttgtccagcttcaggacggcggccagggcgacggattcgcgggccacaccttcctggaggcagccgtcccccgtgaggcagaagatgtgctgggtgaagatgtccatgccgggcttgttgaaccgagcggcggcgcgcctggcggagagagcgaagccgacggcgttcgcaatgccctggcccagcggccccgtggtgcattccacgccttccgtatcccggaatcccgggtggccgggcgtgatggagcccttgtggcggaagcccttgaggtcttcaatgccgatgttgaatcccgacaggtgcagccagccgtaaaggaacatggagccgtggccggcggagagaatgaagcggtcacggttgagccagcggggctgcgcggggcagatgttgagcagatcgccgaacaggacggccccgatttcggcgcaccccagcggcaggcccaagtggccggatgcgcagtcgtgaacggcatccatggcaagtccccgcgcctggttggcggctttttggagaaggtcaagattcatgcccgggcaatatgagcagatcagccccatattggaagcctaaaatgcgtctccggcaacagggcggagcgggggaaaagcattgaagatggaagcgccgggcatctccggtccgcatgccgcggcgccccctgcggcacatggcccggcatgcgcaggcggttcaggccatgaagctgcggaggaacgtgttgggcgtccttagcccatttctctttcacggctccatttgaccccttttttgatgaccttggccgggtttcccgccagagcggtgaattcctcccggaaggatttggtgacgaccgattgcaggccgacaaccgtatttgccgggatgatggcatttttggtgaaggttgccccctgcccgatccagcagtggtcgccgatgaggacgccctgcggctggtcgttgagcagttcccccgtgtcggcgtccatcaggcgatgggagtcgtttgcccagatggtgattccggaagaaagcatgcaatcgttgccaatgtggcatttgccgcccacaagcatgaccgctaatccttcgatgcttgtcgaatggccgatggacagggcgcttccggatgcagctgccagaatgctgacattgttccagtggctgtgcccggacgacgaggagccgaattcgattttcgcgccgcggacatgtttccagatgtggatggagatattgtttaaggagagcggagcatggaagatgagcgtgttgtgctctccctcaatgttcagccggacggaccccggtatctggtacggctcgacaagctgtttttcgccggaaggaagaatgagaaaaatgcggtttcccaccgggtttacataaccttcccctcccgtcttcaaacccaggcggacgcggcgcttctttctcgtttgcggagaaagagataggttgcaatagattgttgcaagaaaacggttcatgaggaaagccccgattcttcatcgagaaaggcactctcccggattctccattcagggtcaagcggaaaatggcgcaatggccttggccccgttgcctggaggcagccgccgggagggcttggcttcatggggtacgccatgcgccgttttcccgtcccgcggaggaaggccgcaagcaagttgtttgcctttccgggatttgaaagaaactttgttgacacccttgaaaaaattagtttataataattctaactaaaagacaccatgagtgaccaaaagaatttaacgacctccgtcggagcgcccgttccggataacgaaaacgtgctcacggccggcccccgcggccccatgctgctccaggacgtctggttcctggaaaagctggcccatttcgaccgggaagtgatcccggaacggcgcatgcatgccaagggctccggcgccttcggcacgtttaccgtgacgggggacatcacccgttacacgaaggctgccatgttttccggaattggcaagaagaccgacctgctggtgcggttttccaccgtggccggggaacggggagcggcggacgcggagcgcgacatccgcggctttgccatcaagttttacacggaggagggaaactgggacctggtgggcaataataccccggttttcttcctgagggatccgctcaagttcccggacctgaaccacgccatcaagcgcgacccgcgcaccaacatgagaagcgcgcggaacaactgggatttctggacttccctgccggaggctttccaccaggtcaccgtcgtgatgagcgaccgcggcattccttcctcctaccgccacatgcacgggttcggcagccatgcgttcagcatgctgaacgcggacaatgagcgggtatgggtgaagttccacctgaaaacccagcagggcatcaagaacctgacggacgcggaggcggaagcgattatcgcgaaggaccgggagagccaccagcgggatttgtatgagagcattgagcggaaggatttcccgcgctggacgatgtacatccaggtgatgacccaggagcaggccaaggcatgccccttcaatccgtttgacctgaccaaggtatggccgcacggggattaccccctcatggaggtgggcgtgctggaactcaaccggaacccggacaactatttcgcccagattgagcaggcggcgttcaacccggccaacgtcgttcccggcatcggcttttccccggacaagatgctccaggggcgcctgttctcctacggggacgcccagcggtacaggctgggggtgaaccataaccagattccggtgaacgccccccgctgcccgttccacagttaccaccgggacggcatgatgcgtgtggacgacaatgcgggaagcacgctgggctatgagccgaacagttacggggagtggcaggaacagccggagttccgggaaccgccgctggagctggacggcgcggcctggcactgggatttccgcgaggatgacgacgattattattcccagccccgcgccctgttccggctgatgaatccggagcagagggaggccctgtacggcaataccgcacgcgccatgggcgacgcgccggactttatcaagcagcgccacatcgaccactgcatgcagtgcgaccccgaatacggggaaggagtggccaaggccctcggcatgttcaagggatagtcaaatttgggtgttccgggcggaagtttctccggaaggggaggcttccgcccgttttttacccgtttgacgcagccaggggattgatggccgtgaattccggcaggcaggacacggaatcgtgaaatatcaggtgcggagggaggacggatggagtaatgtggcctggtggatgtgaatgtgttgctttttgatgattttgagacgctggatgcattcggcccggtggaagtgctgggcaaagtagaggaataccggctgcgttatttttccgaacatggcggaaccgtcgcaagtgctcaaaagacggtaattgtcactgaaccggccacggaggcggacggcggcggaattttagtggttccgggaggaagggggacccgccgcctggcggtttttccgcctttcctgcattttctccggggcatggcggacgatgcggagtattgcctgtccgtctgcacaggggccgcgctgctggccggctgcggcgcgctggacggcagaagggcgacttccaacaagaagtcttttgcatgggtgaagtccgtccgcggcgcagtcggctgggaggaacgtgcccggtgggtggcggacgggaagttttatacttcctccggcgtttccgccggaatggacatggccctcgggtttgtgagcgaccggtttggcaggtcacgggcggagggtatagcggagcagctcgaatacgtgtggaatgatgactgcaccagggacgtgttcgcgcggaaatgaggttttttcatggctggaatccctgcgcggccagcggaaccgcggcattgcgggaagaacgcgttttctgctttctgtgaggaaagagcctgttatatcatggagggcagaagtacatgaaaatcgtagttaaagtaggaacgggcgttctgacccgtgagaacgggacgctggatggttcttccatcgtgcatctggtcagcgcgctggcggacctgatgcagcagggccaccaggtggtgctggtgagctccggggctgtgggttccggcgtgtccgtcctggggctgccgtcctatccgcaggagttgtccctgaagcaggcatgcgcggccgtggggcagacgcggctgatgcagacgtatgagaatcttttcaaccattttgacgtggatgtggctcagctcctgctgacggcagaggatttgaagcgccgccgccacaacgtgcaggctacggtgctgcgcctgtttgagtacggaggcatcatcccgatcgtgaatgagaacgataccgtatccgtggaagagctgaagttcggggataacgacattctttccgtgcacatggcgcgcctggtggaggctgacgcgctgtttatcctgacgagcgtggacggcctgtatccccccggaggcagccgggaagccatcattccccgggtggaggacgtggatgccgtgctggcgttcgcagaggaggaccggggccgcttttccatgggcggcatgagcgccaagctccaggccatccgggaggccgtgaatgcggggacgggcgtttacatgctgcacggccgccatccggaacgcatcgcgctgctgctggaggggaaggcggaaggagccggaacgtattttgtaccgaagggatgaagttatgaagatggagaatcctcttgaaccggtgggacgggccgcgctggcggcttcacgggagatgcttgccttggagccgcaagagaaggcgcaggccctgcgcctgatggccgcaggcgttcggagcgccgcggaaaagattgtccgggagaacggccttgatatggaagaggcccggaagggcggccgcaatgccgcgtttctggacaggcttctcctgacgccggagcgcgtggagcacatggcccgcggcatggagcaggtggcggccctccctgatcccgtgggcgaatgcatccgggagtggacgcgccccaacggcctgcatatccgccaggtgcgcgttcccctgggggtcatcggttttatttacgagagccgcggcaccgttacctgcgatgccgccgccctgtgcctgaagtccgggaatgccgtcattctgcgcggcgggagcgagtccctgcgaaccaaccgggttctggcggaggttctgcgcgccgcgctgaaggagtccgccgtccccgcggacgccgtgcagcttcttgattccggcagccgggatgaggtgcggcagttgtgcgagctggattctttcctgaacgtggtcattcccaggggtggaaaggggctgatccgcgccgtgacggagtacgccagggttcccgtgctgaagcatctggacggcgtttgccacgtgtatgtggacgccgcagcggatttgaagatggccgtgaacgtgctggacgacgccaagacacagcgcccgggcgtttgcaatgcggcggaaaccctgctggtggacgccgccgcggcggaacggttcctgccgatggcggcggagcgcatgcgccggcgtgccgtggaatgccgcgtgtgtgagcggagcaggccgtttttcggtccggaggccgttcctgcggaggaaagggattggtctacggagtatgaagacctgattctctccgtgaaggtggtggacggcgtccgggatgccgtagagcatatcaaccgctacggttcccatcacagtgattccatcatcacggaggatggaaaggcccgcgattatttcatgagccgggtggacagcgcgtgcgtctaccataattgctccacgcggttcagcgacggggaggaattcggcttcggcgcggagataggcatcgggacggacaagtttcatgcccgcgggccaatggctctgcgggagctgacctcctacaagtacgtcattgaaggcagcgggcagatgaaggacccttcccggattccgggggaagaccgcgcctgaacaggcacgtccgcaatcagaaagggagcaccgcagcatggccgcgatgctccccgcttgtacacacccctgaagaagtcccgttagaaagtcagcctgtagccgatgcttccgttgaagctggtggcgcggctgcggaagtccgcattgacatccgcaaaaatggagctggtgtaacccaccggaatggtgatgcccgcgcctgcctgcacgccggtagctccttccctggctccgttcacgcggaatcctgcgccgggcacgccggcgggcgacagcgccgccgtggttttccggtcgcccaggagctggacaacctgcacccgcagttcacccatggacgcgcggcccgtcaggttgctggagagctctccgcggagcctcgcccccagtcccacggtgccgtaggtggaatccatgtcgtccacgctcatgcccaggccccctgattccgtgaagccgtccattcggctcttgtacacggaggcgttcaccaggggctggaacgcggaggttttgttttcatccaggtacaggtcatacgtgccttcataaaaggcgccgtagctgctgccgctggtgctgccgtgcatggcgtacatgccggctccggggatgcctgcggtgcggtccagggaagcgtcgttccatccgtaggtgaggatgacgttgtgcgcccagcggcccgactggatgcggaagaacagattgccgtagtaggagtccaggtctccgttcgccatgtaggcgtccaggtcgccatagctggcggagaaggccgctccccatacgaagctgtcgctgcacgttacgtcaaatccgaaggtgccgccccaggtgttgagcttgtagcctgattcgtccatccggtcatccagtttgcggtagccgccttccccttcaatccaggcgttgaagcagggcaggtcatcgttgatgtactgcggggaggctcccatctgggagaggcggttgcgcaggtggagcacctggtcccggagggctcccttctgggcggagtgcagggcggtgacgccgctgcccgcataggaggagagggcggattgaagggcgcccgtgtcccccatggcctgggcggtgcccacggcattgaggaattccatcatggccggggtgatgcttccgggggaggaggtgacggcccacaggctgtccaccgcggctctctggttttccgtggaggcgaagtccttcagcgggctgtctcccagtttggtgaagtggacctggaacagcttgccgtcgtcggagagtatcttgctgatgtcatagacgaggttggcgaagccggcataagtcaggttcaccatgtccgccgtccaggtttccccgtttgccgtggccaggccgttttccgcatagaaggcgttgatggtgaattccggcaggatggcccagtctcccgcggtacccaggccgtaaatgttgacgttgatggatgggtccgccccgttgatgcggatggagccgttttccgccttcacggcggcccaggcgttgtccgcgctgcgggccagcgtttccgtattgacggtgaggtccagggaagcgccggagtccagatcggccgccactccgccgttgctgccggtcagcacgagctggaccgcccgctggttgggattgccgcccaggtacagtttgccgttggaggcgatggagagcgtgttggccgtggtattgttcatcagggagaggtccgccgtggcgtccaggtcggaggcgtcccgggtgttgctgccgatggaaatatccctgtaggtcatggagccgtccgcggccaggtccttgtctcccaggacgaggtggccgcccgcccgggtatggctgacgtccacgccgccattcccggaggaaaggatgatctgcgtgccttcgccccggtgggtgatggctcccgtgccggtgatatcccccttgaaggagtaggttttcccgtcgttggaggccagttccagacgtccgtttgcccccaggtggagcgcgccgttttcctgctcctggtggagcccttccagcgcgatcgtggagccgtcctgcaggcgcaggctgccgccccccagatggagcagcacgtcttcgcccagattgctgtccgtgcccagaatcaggttgcaattgtccagtttcagggtgccggagccggtgacgcttgcgtggagcgtcaggtctgaaagagtgtctctggcgatggtgagcagggcgcccccgttcagggtgatggagccggagcccgccagatccccggcggccagggaggcggagttcagcgtcagcgcggcatcctgttccacgttcagggcgccggagatgatggaactttccttcgtgttctggagcacgagttctccctgctgcacgtccagagcggaggcggtcaccctgccgtcaacggtcagcctctgttcaccgtccttgacgagctgcgccgctccttcaatggaacccgcgtaagcggtgttgcctggtttgtccggatctgcggaggtttcattcagcagcgtgatgatcacgtcgctgtccgttcccgtgttcacgacggcatcggcttccgtgccggccagatagcggatggtggttgttttgtcttccggcgcagtggccgcggacaggtcgatgttcagcgttccgttgttggtgacgctgggggttgcccccagggtgctggcggaggtgacgtttttggaagctcccttgtcaatgaccatggcgtccagctggccgaaggagatgattacctggccgccttccgtccgggtaatgtcccacgccatgccgttgtattcgctcagcgtgatgtggttggtatccgcgtgcagggcggcgttggtgacgtggaaggcgtagtcccccggagcggcgagcagcgccacggcatccgccgtcagcgtcagggtcaggttccccagggtcagagtggaattagccgcgtcattgaactggatgattcccgtgccgtccgcgcccatgttggcggcggaaagcctcaattgcgtgtcggagccggacaggtccgcatggcccgtcaggccggaaatggttcctgtgccgctgcccatgttgatggagttcagcttgcttccgtccaggccgcccaggttgacgttcccggtgatgccggagacggagacgctcccggcgcccagccccgccgtattggcgagcgcccccgcggagatggatattttcccggagacggcctgcccggccaggtccagcgttcccccttccacccaataggttccggttccggtgtctgcggatttgagggtcaggttgtgcgaggtgcgaatcgtgccgttgttggtgatgtccagcgtggctccctggtcctggttgaaccggagggcggagcctgcatccacggtcagggaggcaaccgtattgcccagggccttgtccagcgcaaggtccgaatttccggtgacctgcaccttgtcaaagttctggagcgttccgaggaagccggtagtgtagtggtcgaagacgagcttcttctccccgttcactgttcctccccccttgccgtcgatggtgccggcgtatttgtcaaatttgtgttcggaaccgtctccggtggtggcggcaatgtccttcagggtgatggcggtgcctccgttgatggtgccgctggccttgttgccgccgcacaggagcgtccatgtccagttgtccccgtcagccttgcccagaatggcgtccgtgcccgtgacggtcaggctggttccctgggagatggtgccgtccgtcttgttcccggcgtagatttcgttcatgaacgttccgccgttgatgtaaagggaggtggagccggagatggttttgtttcccgtgtaaaggccgccgaaaatgcggtgggagaatacgccgtcattgaacactatggtgatgtccccgtccacggcggtggcgtaggctcccgccacggaggtgcggtccgcctccccgttggtgaaggaggtgtcataggtcccggtggaggaggagaattccaggtaaatatccccgtggacggtgcccccgttaacagtgccgaataccgtggatttgccaatggccccttccgccaggcgcaggtggatgtccccgtacaggtcgcccgacgtgtggcctcctatccagccgttatcgctgctgacgccttcccccagcgtcacccacaggtcctggcggctgtccgcgctgccataggccccgttgttggcgtaaatgaatttggtgcttcccgttcccgtgatgctggcgatgttggagttggtgccgttgcgggcattatacgtggcattggccccggccgtagccacggcggtggcggcggcgcccgttgtccattcgatcatgcccggcttgagggcggaggaagctccgccgtttgccagataaagggcttccggtccggtgatgccgctggtggagggcgcgtaggagagggagccgtccagcgccagattggacaggatggcgtccagcgtgccggaatagctgaaggtgaggccggaggagctgccccccgccgccgtctgcgcctccccgatgaggacgtcccccagccagatgtagtagcccgcgttcaggccgtgggcgttgtcccccgccacgtaggccacgcggatggaatccgcattggcggacatgtctctggagtacaggatggtgctgccccactggatgtatgcttcattgatgttcagcgttccgttgcctagattcagggagaagttgttcgtggtgtcccagccgcccgtggcgccgttgcccaggcgcagggtaaaatccaccgtgtagcccttgtcctgcccctgggaggctccccagttgtaagtgagggtgctgctgccggatttgttgaagttgatcgtgttgttggagatggtgacgttattggcggtaaagcccttggccgtcagcgtctgctgggtgatggagggcgtctggccgaagttgacgcccagttcgtgggcggctttcctttcctgcccggcggaccgccccgcgtaccccatgcccttggccaggttgcccgccatcagcaggtccccctgggcgttcgggtgcagcccgtccgccgtgggattgtggaacatggagcgcaccccgtagaaaggggtggaggatgccacgtcaatgatgcccgcattgatgtcaatgactttgacgccgttggcggcgttttctgcgccccattctttcagggattcgttgtaggtggctacggcctggtgcgtttcagccaggttcccgttggaatgctgcgtccagcaggggatggtcatcaccagaatgcttgcgtggctgttggcggtgcggatggaggagacgatggaatccatgtcgctcagcagaaggtaggtgaccccgtccagccgcaggtgcagcgtactgttgttgttgtcggaaaggaggtcgttggtgccggcgagcaggaaaaacgtgtccggcgtgtcggccccggtaaaggtctggcccgtgtaggttcccccctgggttttttccgtgctcaggcccagccagttcttgatgttggagccgtcaaaccgcccgtagctgctgctgttcgccctgccggcgatttcataggtccgcgcgctggccgcagaggaatggagattctggaaaatcctgccgccgtaggaggttcccgcggccactccgccgctgtagttgccggtcatgatacctttttcggtatagctgatgccgttgtctgcaaaaattttgtgcatggcccagcgccaggagccgctgttgacgccatgggtgatggagtcccctacgtacatgacgttgccaaggtttccgtctgaaacagaggcggaggccacggtagagaacagggcgctgcacgcaagcaggacggaccttagagagaagggtaatcttaaacgcatatcctagcagtatgcgaattaggaatccggcctcaactcaaaatgttgaagtttagtgtattataaatttcaatacattgagattgaaatcattgtgacacgtctggtctttttggagcttgctttttcccctgatttttgcagggcttgggatttgccgtgtttttagcagtaactgacggattcctaatccgttgcaggattagtcacaaaggcactggttcatgtccagcgcagggttgtccggaatggagtcattgacgatgacggcgggaacgcccgccaccgtggtatggggagggacgttttccaggacgacggagcaggcggcgattttggcgcaggcgccgatggtgaccctgcccaggattttggcccccgcgccgatcaggacgccggattccacaatggggtgccggtctccttcctccttgcccgtgccgcccagcgttacttcatgcaggatggagacgttgtcgcggatgatggcggtttcccccactacaaagctggtggcgtggtccagcaggatgccgcagccgatggtggccgccgggtggatgtccaccgcaaagacttcgctggccaggctctggaactgaagggccatgatggtgcggccgtgctgccacagccagtgggagatgcggtacgtggtgatggcgtggaaccccttgtagaagagcaggggttccagcggcgtgcggcaggcggggtcccggtccacgatggcgatcaggtcgttggcgatctggctgaggatgttctggttttccgccagcgcctcccggatgaggggttcgatcagttcccgcggcatgtcccggcgggagagcttgcgcgccagccgggcagagatggaggtggccagggaattgcgggacaggcagacgtcgtccagaatgccgcgcatggcgggttcttcctcagccgcctcgcgggcgcattccaccacccagtcccatactccgttgatgatgcattcgcagttggtgcactgccggagttttgagcgtttcaggctggtcatggcggaagaaggtggaaaggcaaaaggagccgcctttcccgaaggggaaggctgcacccccacaagtaccagagtacggcggatttgagaaccggaaagtacgtcctatgcccagccgggcatgacctgcctccgtcagccgaagatgacgtgcacgatgtccatgcaccaggcgtccacggaccacgggccgggaccggtcagcagcagcgccagggcggagccggcatagagcaggtggaattccacgccttccccggcttttttcccggaccagttggcaaagtagccgtttttaacgtgcttggtcatggcgacggccatcatgatgatgaccgcgagcgcagctatcctggtgaagacgcccagcaccaggcagatgggggcgaagaattccgtcagcatggccaccttggccaggaaggggggaatgcccattttttccgtgaaggcctggtacgtgccgtcccagcccgctcccccgaaccagcccagcactttctgggctccgtgcggccacaggatcagggccagcgtcagccgaaggaccagcaacccccacgccgccgcaataatggtaatggaatcaatggtgtccatgaatttgaaatggttgaagaaaagacccttttattccatgggacgttcatttccgggcatggaaaaggccggaaaaggaggtcatttcctccctctccggcccttgaagtcaggatggcgcgtccgttaccggggaatggaatggtaaagctgttccagcgccagcacgcagtaggaggtcaccaggacggggtccgcctcccaccagcggttgttggtgtttacccaggagccgtcgctcttctggatggagatgagcttgttggccagttcgtcacgccagtccaccttgcggccgtcttccagcgtcagggtgtctattcccatggcgctgagagccttggacatggcctggtagtagtagtacaggccctggacgcccatgccggggttttcatccaggttgtagctgttttccagccatttgagggccagcttgacgcgggggtcgttcttgtccacattggcgtaaatgagggattgcatgcccgcgtacgtcatgctgccgtaggccctgggcggttccgccttgtcaaacgcggcgcttttgctgtccctggcgctggcgacgcccgggcggtacacgaagccgccgagctgggatttgtcactggagacccagggttccttgttgacggctgggttctgctggcagcggttgatgaattccgtggcggcgttccagtccaggtccggctgttccccgtatttgccgtccttggcgagcttctgggagtagtaaatggcttccagggccagggaggtgttggaaaggtccgcaatgggaggggcctttttgtccccgtagccgatgccgccgttgtaggggttgtccggagcgaagtggttctgctgcttgatgaggtaggcgcggcccttgaggatggcgggggcgtattcctccttgttggcggccagcagggccatcatgcacaccgcggtgttgtaggaggacatgccgcggttgaagatggagccgtcctccttctgggatttcaggacgaagtcataccccttccggatgtattccgggatgggcttgccctggttggcggggtcgcgcatgtaggcggtgaccgccagggccgtcagggccggataggacggctgcgcccagtagccttccgggttctgcttgcttttcaggtattcgttccctttttcaatggcgcgcaggatttcctggctgatggaggcgtatttggaggcggccgcttctccgggaacggccgtcacggtggtctggccgaaggcggctgtgcccagcgcggcggccagcgttaatgaaagtgcggatttgaacataatgtgctattgcttgggttgaaccggtttctgggagatggtgacggtgacgttcgtgccggggggcaggtttttcttcgggttgacgatccagcccgtgtcgttgacgccgtcatgaaagtcgccgatgtagttgatgggggaggtgcggctcgcgaagatggagattacttctccgctcaggctggcctggtaggccccttcgtaaaagaaggagttggtgtaaagccagtcattggggtccagccccttgcgggtctgggagttcacgaccatgtcggaaaagtcgctcttctgctccttgccgttttccgtgtaggtcatggcgacctgcacgtaggagtccgcatagtccgcgggcttgggctccgtgaaggggagccattcaaagttttcatcccgcaccgggaagaatttttcaaagcggtggaatttgagcagcgtcatgcccaggctgatgtgcagggggtccgcctccgtcaccagcagggattcatgcagcttgccgttgggcatgcagcagatatattccagaatgccctcctgcatgttgacctgcgcctggaagctgacggtgcgttccttgtggttcacgatcacgttgcctatcttgatgcggtgctcgtccaggggttcgaatttgggtaccgtcttgccgtccggcagggggacttcccggggggcttcctccggtgcgggcgcatccggatctcccgccggggcggaaacgtcctgcgcatgggcaaagccccaggagcaggcaagcagggtgatcgtaaatttcaggaacatgtttatggaaattagattgtgaaaatgaaagcttccgttcaatgaaaaaggcatccgtgattgatttgttacttttgaatcacggatgcctggaaggaatgatggagggagcctaaaccagtttcagcctggcaaggtcctgaaggtcgacgatgcccacgggagtcatttccgcgttgagcaccaccaggtcgtcaatgtggcggttgctgacggccttcaccgcctcggcggccaggtcgtcttccatcacatagatggggttgcgggtcatgaggccgctgacgggctgctccccgatgaggggattggctccgtacgcgcggacgaagtctccgtgggtgaagatgccggccagcttgttgtccgccgtcagcaggatgcaggcgccggtgtgggcggtggtcatcgccttcaggcagtcgttcacggaggcggtttccggaaggatggccatttcctccccccggcgcatgatgtcgctcaccttggtgagcagcgcgcggcccagggagccaccggggtggcgtttggcgaagtcccgcgcagtgaagtggcgcgcttccaccagggccatggcgagggcgtcccccatgacgagcatggccgtggtgctggaggtgggggccaggttcagcggacaggcttcccgggaaacgcccgtgtccagcacgatgtccgagtatttggccagggaggaggccgtattgcccgtcatggaaatgatgggcagttcaaagcgtttgatgaaagggagcagggccagcagttccgaggtttccccggagaaggacatcgcgatgcagacgtcgccgtcctggacgatgcccaggtccccgtgcagggcgttcagggaatccagcaggacggtgggcgttccggtggagttcagggtggcgacgattttggctccgatgttgccggatttgcctacgcctacgatgacgatcttgttgccgcggtccagggcctgggacatgagttccacagcctggttgaaattgtcatccagccgggacaggacgccgcgcagctcttcaatctccatttcaaaaacggatttggcgcgtgttaaatgattcatatctggcgggaatgatgccagatgcccccatggccgtcaatttttcattgcggctccgcggtccccgtttttccggcacctgcacgcgggattggctgccagcggaatggtggtgaagcgcatgcgccgcgtgtctgcggagagcatggcccccaccagcggagaggggatgccggccaggtatttcagggcttccatggcctggatgcagccgatgatgcccgcatgcgcgcccaggatgccggcggcggaggcggtgtctttctcctgcatgggcgtgtctgccgggaagaggcagcggtagcacgcggtgccctggtggggggcgaagacggccacctggccgatgaagcctttcacggctccgtgcaccagcggcaggcgcagggcgcaggcggcgtccgccatggcgaagcgcgccgcgtagttgtccgaggcgtccaggaccaggtcgcacccttccagcagggaaacggcgttgtccggagtgagccgcctgtggaccgtgttgatgtggacggaagggttcagggcgtacaggcgcctggcggcgctggcggtcttggccgttcccgccgcatccgtggcatgcaggatctgccgctggaggttggaaaggcagacctcgtccgggtcgatcagggtcagccgccccacgcccgcggcggcaagataaagggccgcgggggagccaagccccccgaggcccgtcagggcgacgtgcgcccgtttgagtttttgctggccctgttcgcccagttccggaagggaaagatgccttgcgtaccgttcggtttcttcctgggtgagggtcattgctgtcgtcgggattaacggcgggcggagttgccgctgaaggcgtacaggagcagcgtccatccggagaagatcagttccactgcgatcagggtgccgatgaaccaggccgtggattcaggccagccgaagatgaccatgaggcccaggatcagcgtgatgatcacgttgaagagccgccagccgctggcgggcagggaacgggtctggagccagatggccccctggaagacggcggcgatgaccaggccccacccgatgatgagcgtggtgatggccagggaaatattggggtcccggaacaggaaccagccggcgatgccgtacaggatggccgtcaccaggttccaccagcgggaggacgggacggtgaagacctggaccagccggacgacggccaggatcatcagcatgatgccgatcacccagatgaagctggccccgacaatccagggagaggccagggcgatgaagccaagaaatagctcgatgacgccaaggatacccatccaccatgagttgccggataccgcggagctgctgacttgaggttgagttgtcatatggcggtatgaccggacccgcggcggaaacgttgaagaatgacgattttatttgccggcggatgcctgcggcggagtgttcttcgggtccatggtcttcagcagctccggagtgacgttgatcagaacggggccgcttttggggtgcgcctggggggggacgaagtaggaaaaggccctggcgggcagttgtcccgggatttccggcatgatgtaaacctccacgagaacggcgccctttttgccgttagggctgtcggaaaagttcagcgtgagggagttggttccgtccctcagcccgccggaaatgatttccgccaggcgcgtgttgtcgaattcatgcggggaaatgttgtttacgttcgccttgacggtgcggccggggcagtccaccagaatttttgcgatgtatttgggcggcgggcagacaggcggcacggcgggaatttttccaaggggctggaagccgtcctgctccatcaggacggtggcgtcgccgcgcttgaggcgttccttgacggcgggcaggcgggtgaggttgaagaagcgcgcctggtcgtatttccatttgccgttttcgtgggtgaacagcaggaccagggcgttggagtccgtcggttcctggcccagccccaggtccaccttgccgtagtaggtggccgcggccgtgggaccgtccaccacggagcccacgtacatcagcggggcgagcgcgggcggagccatgggctgccggaacagggaggcgggaaaggggcgtttttcagagacggccaggttgcgcactttcacctggcggtaggcggaggtggtggctctccagccgtcatagttgccgcgcagcaggtgcaggcgccatgtgttgtaggctacgtccagatcgtccctcagtttggcgtctccgggccggggggcggcggaggcgggggcgagaagagctgcggcgcagcaggccatggtgagaatggagcggaaagtcattacacgattatttagacatcaaacttgcgcggagtgcaacacaattgcatcatgaagccgttcttatggaattgttcacggaagccgatcatctggcggaagcccggtacaggaaactgttgcgggaacagcccggctttgtgtggaggcggttttcagacggtgaggagctgatggcctacgtcttttttcctcctggccatcgagagggcgcttccgcgccctccgtgctgttttttcacggcggcatgtgggtgggaaagagcctgggggattttgtgccatgggcgcttcaccttgcccagcagggaattgtggggattattcccatgttccgtacgcgcggcgcttatgaggtggagccgatggatattctggaagagggccgggaagcctgggcctgggtgtatgaaaacgccgccctgctgggtctggacccggcccgcattaccgtagcggggagcgatgcgggaggactgatggccctgcatgtggccctccccgaccatcccgcgcgctggtccctgttccgcaggaaggctccccttccgcccggtcctgccgccgtggccctgttccgcggcgtgtgcgatctggcggcgcagtccgcctttaaactgggaggcatgatgccccctgaccagcgggatgccgtcaatcccctgcggcgcgtgcagaaagggctgcctcccctgttcgcgagccatggcggaagagacaggctgctgccgtggcgcaatagcgagcggctggcggagctgtggcggaaaaagaaaaaccgctccagatttgagcttctggacgtggcggaccacacgttttaccatttcaatgtaaatgccgcctattttgagcaattgctcaacagttggagttccttcatggtggagcagggcatttgggaatataacgagggaatggacgccggattgctgggctgaccggagaataccgcccgtgaaatacacggcggcaagggtggggctttcctgtcagcggccgcccagcatgttttcccggatttcctgcatgtcccggcggaaggcgggctgcgtctgcggggtaggcggctggatatcccattccttcatctttttgcggaccttgaggaatgcctcctgctcgctggcgccgtatttcttgcagacggtggagagggtcagttccggtcccgtgaagcggcccttgaggaagaaaggcaggtcgtgctgccacgcgcgccggaagtcctccgggcatccgtccgtcctgatgggggcgaacagttccctgacctggctttcccggatgcccgcggtgttcatgcagatggcggtttccatgtaggccagcgtgaattccagcatgacccgttcaatggattgcctggcctgggccagttggtccggggtaaggcccatgacctgggcgcgcagggcggccagggcttccaggatggccttggggtcgccgcaggtgcgcggatccatgcgggggatttgttcatcctcgtcgtaaaggggaatgggcggatgcacccgggaattgatcttgaacagtttgccctggagccgttcccggaggtccttcaggctgacgccgtacttgcgcaggacgggtgccgcgtaattgcgccccggcttgttcgtctgccgcagccatgcttcctgaaaatcagaggggcattgctgaaggcccgccgccagcatggcgttccggaagtcctccgccttgggcgttttattggcataggcgtgggtccattccatttccagcatccagatggcggtgaggcccaggaattgttcaatcgcctgtttggcctccgcgggttccggtgcgggaagtcccgccggagcggcggcggaggacgggatgtgccagcagaacgggaacagcagggcgaaagccaggaacgggcgcagcagatgcatggggggaaggaaagagggttgggaagggacggcagcgctcattcggctgtcacggtaacgtccagcgggcggtcggaaacggggaattgcaattcataaaaaccgttgcccaggttcttgacgggaacgttccctgccttcacggggcttttcccgcgccagacgacgaccgggccggattccttcacgcggaagcggaggctgtccgccccgtattccggagcggcggccagggcgcagggagagaggaatttgtcccccctgccgatgacggcccagccccggacgatgggcgccatgatgaacaggcggtccttgaagcccgttaacttcacgtccaggtccggctgtgccggggtcagcgcgcagcctccctctgcggaataggcggcgattccctccgccggaatggaggcataggcttccgccgcgttgccgttcagcagggccgccgcgtttttataatcccccagggaaattttcccctgcaccggttccgccggggaggggtgtttgaggttgtacagcaccacggcggcgctttggccgggcagcggggcgatcacccggtacaggcggttctcgttcagcgcatccagaaagacggaatccggcagggggacggcaggggccagcggccgcagcagaaggccgtcggaccagaccaggggcatgatgttttccggattgagcttgtcagccgggtctgaaaggtagacggggcccccggatacggccttggaaacggccatgaggcgcgcgctggtggggtccgtggaatggaacatgtcatggtccggccacgcggtctgccccagccagagcgtattggcgtaggactggaggatgtgggacttgcccatggcttcatcccccagcttgtagtcaatgctgcaccgggtgatagcgctgtagcgggtattctggatgttgacggtgccctgcgccatgcaattcatcaggctgaggcccgtcttccggcatgcctgttccaaggcttccgaacacttggtgttgtggtggaccgggttgtccaggccgtccgcatgcttcaggtattccgcctgcacgtcgatcttcacgaagtcgaacccggcgtccttgacggattggagaaaagggttgtaaaacgccccggctcctccggggccgtcaccggggaggattttccccttggtagtgctgaccagcccgcgggccgtctgggcgtccagccggtgcttggggtggatgccgttccagaggccgtaatagcagttccacaggcccatccatttcaacttggagcttttgtgcttcatcaggggctgccagccctgcgggaatttgtcctggcgggtctggaagctgatcaacttaagcccttcctgggtctggaacccgtcgtccaccagcatccaccggacggggatgggggaggcctccagttggctggccgtttcttcaagcagcttggaggagatgttctttttatactgctcccaactgcaccatccgaggtatttgaagggttccggataaaccttcttttcccggggaaaggttctgcccttgatgaaggggagggaaagggccttgttccaggcggcggagcaggcgcggtaaatatccttgtccacggcggtgacggccaggacgggctgcggtttggcggtggaagttcccagcgtgccggattccacaaggaatttgccgtctccgtcaagcttcagccacgtgagggaatcaggggtggcgacgggcagcacggccatgaaattgccgtccttgaggtggaacagcgcaaacatggcgtggtcccccggtttggcggtgctggggttcggcttgctgtccagcaggttgccgggagccgtccggccgaaccagggcagcacccggttgccgtctccgggccagcggccgcggtccgccgcgaaccagcagaaggactggtagggaggtacctgaagggaacgcgcgttttttcccggcagcgggggaatggtggatatccgggtttgggcggcggcagtccagatgctcagggccgccaggacaagagccgggaacgtgaatgctttcatgggaatcatcattaggttaaggaaggtggcagatagactggcagaagggcaggaaggtgcgcttccctgcttttcggaaaaaaagccgttgcgccatgatggcaaagcattttccggagacgagcaaaaaatgatgtttccgccttattttgcttctttttccatgtggaaaacggattgctaatccggcgtcaagctctgattttaagggaaaggtgcttatgttgcccggtcgttttataatgggagtctgtttctccggagaaaaggcttcctccgttgcgttgccggtacgtggagagccgcgagcctttgcgggtgtggaaatacatatattccgtcagaatatgctgaatttcaggaaagagaaatcattgctgcacaggttggcgtccggatgccgaggggcttgcggcgcaccatgcggcattggaactattccgtaacggattagcaatccgatattagaaaaagcagggttccaagccttggcttctgaccgcagaacgctcccgggagcggatttgtgcagcagtccggcgataggtgcggatccattcatatccatatttaacttttgattttatgaagaaaaccttattcactgcttcctgcgtcctggttgccttgtccggcctaggcgcagcggccacctatcagtggacgggaaacggggacggatcctcctggacggacgcggacaactggacggaggccggcgtgcctcctactactctcggcgcgggaaacagcatcatcatcaacagtgacgcctccatctccaccgccggcgcggggagcctgaattacaggaatgtcgaccagtttgttctgaaaggcacgggtactctcagcaacaatacgggaggggccttggttttagggaacgtggacatggacaaatctttttccctgaactcaggcaatacgcagctctggggcaacttgactattgattccagcatcaattcaggagcgctgggaggcgggctgtccacggggtatgtttgggatttcggattaaacggacgtcttgcgacgaccagcctctggatcaatgcgagcgggggaaccatccaggccgccattgatccgtacacgaccaccggaaccgtcgggactgcggtgcgtgaactgctggggcagaacgcttcctcctcctcgggcggcaacggctttgatacggttgactatgtggtcagggacgctgacgggaatatcctgacccgtgcggacggtccgctggaagctacggaagaaaatgtgggcaagtattggatcaccaccaatgggggagcctgggccaacgtgaagattcattacatcaccggagcggctccagttccggaacctgctgcggcaggcctttccgccgccggtcttctgctggccctgctgcgccgccgccggatgcgttgagtcgggcgttgctgtccggactggttttcggaagcgcctctcctgtacgggaggggcgtttttgtttatccggtcatggccaccgtttttagcggctgtccggttctccggatgggagtattcataacggggtgtcttccggagagagccggcctcatagccaggattttcatccacgccgtcacttggccgggcttttggcgaaggatacgcggcgcctgtaaaaaaagagcagaaccagccattgcagcaggagaagggaaacggcgagcaatacgggctggaaaggcgggaagaagtccgccgcgccgctgaagatgcgctggttgagttcatgcacgttgagcagggcgtggatgaggtaggcggccagggcgttgacgccgatgacgcggaggggaaaggcccatttggcccattttccgccgttccatgcgtcgacggccagatggaacagggacaggagcatcagggagattccggcagcggccagaacgaaggtgccggtccacatgcttttaatgatgggataggcgccgtccagcattcgggcggcggaaaagaggaggattcccgctcccatcatcgccatgcagaggcggacggaaggcaggcggctttccttcaaaaattttcccgccagccatccgcccatgcacagggcggaagcggaggcgatgcagagggggccttccggatcaaagacgcctccgtgcagacggccgggaagccagtgcatgtccacccaggagttgacggagccgtccggcgtgaagctgccgcaggtgaattgaagcagggcgatgaggcccagaaggcctcccgccgccgccgcaatcgctcccgtgcggcggcacagcaggatgcacgtgcctgcgatggcgcaggaaaagccgatcaggcccagaacggaggcgtaacgcatatcctccgtccaggtaagcgttccgttgaccaggaggcccaggaaggccagaacgaaggctcgtttccaaaggtggagaagcccgggggccgcagaggcgtttccgccggtgtatttcgccagggagaaggacatggaaacgccagagatgaacacgaagacggggaacaccaggtcatacaggtgcaatcctgcccaatgggcatgcgacatctggcgcgcggcttcccggaggaaggcgttttccggatttctggcggccaggagcaggaccagagcgtccagccccaggatgatgagcatgtccagcccgcgcagggcatccagggagtgtagccgggggggacgggcgggaacggaagaggaggcggtcatggcggcggggaggaagaacgggaacaggtacggacggaaaagggcgtctttatcaggattcctccaaacatgccggaacagaggggaatcgtgcttgatttccacgggggaagagggtaaagcaggccgcatgccgcgctcccctctcgcctttctccttttcctgtgtgtctccctgctgctggctgcctgttcctccacgcccaagactccgcatggcaagccgttgatgaaggacggcaggtactcttcttcctatgacgcttttgtagcggacccccagtaccgcttcacgcgcgacatctggtaccatgacgagcgcatccggcaggcgcagacgcggaacagcaaaatcgtgattcatttgaaggaccagcgcggcgtgctgtgggtcaacggccagccggccatgaactttcccgtgtgcactggcagatccacccatgagacgccccgcggcaaattctccatcattcagaaggatgcggactaccgctcccggtcctatggcagcgtgtttgatgcaagcggcctgtgcgtgaattcggacgccacctcttcttcccgcgtgccgtccggcggcaaattcatcggcgccaagatgccgctgtggatgcgcattcacggcgggatagggctgcatgtgggcacggtgttccgggacgccaattcccatgggtgcatccgggtgcctgtggaggcatgccgcattttgtttgacaaatgcggcatgggaacaaccgtagtagttcaggaataagcgcgagcgtgaataatcgttgattccttacggtgcatctgtcacactcctgcaagctgatgaaaatgaaggttctgatacgttccctggtattgctggccgggttggccgcctggacggcggatacggcctggggccagtcctcctcacgccattcgccttcccgcgggggaacgcccgtgcgccaggctgcggcgcagcagcgcggagaggatgacgccgtggaaacggttgacctgggggataagaagagggaatccggcacggcgtccggtgaacgggaaggcgtggctgacgccccggaaatgcccaaggaaacggagaaggagcagaacggcctggattccctgtccctgattccctccctcaaggggggaaggatggatgcggcgcgggaagcgcacaccagcacgcggccttccgccagaaccatggccctgctgattccggctccgcgcggccccattctggaccgcaacggagagcctctggccgtgacctccgtggcctaccaactggccctgcgttttgaaatttttgaaaatcccgatcgttcccgcgtggtggacttcgggcgcaactgcctggaacaggccaagaaaattgccggaaaggcgtggtccttttccgatgaccagctctggaagcactatgagcaccgccgctggctgcctcttcccctcaccaacgtcatccgcgcagaggaagcggaaaaactgaaggacaaggtgaagggggtgcgcggcctccagttgctgcccatctacatccgttcctatccggaaaaggaaatcgccggacatatcatcggctatgtgggttccaagggaaaactgcctaccggccccatcaaccatatggacccgctgtgggaacaggtggaaggccgcgcgggactggaaaaggaattcaacaaggacctgaccgggacgcccggcgtatggcgcctgatgtttgacgaggacggcaacaagattctggatgaacttcagatacgccccaagcccggcggcgccatcgtcaccaccctgaacctgaaatggcagcgggatgcggaacgcatcctttcccgcggcaagaggcgcggcgccatggtggtgctggactgcgtaacgggtgaagtgctggtaatggcctccacgccgtcctatgacccgaacatgttcattccgaacatatcccagaaggattacgatgccctgcgcaacgaccccgccggaccgctgggcgcgcgcgccttccaggggcgctacccccccgcctccaccttcaaggtgctgacggtggccagcgccctgaaaaataacaagatcacggaaaatacgcagatctactgcccggcatccatcacgatcggcaaccacgttttcaacaactggagcaagacgcccctgggggacatcaactgcatccgcgccctggcgatgtccaacaacccgttcatgtaccagatggggctcaagctgggagcggaagccctgatggatacggcccgcgccttcggacttggtgagcgcaccgggctgcccattccggacgatcccggcctggtgcccaccagcgactacatgatccgcaactacaagcgggatttcatgtccggagacgccgccaacctttccatcggccagggaacgctgctggtcacgcccctccaggtggcgcacatgatgtccggcgtggcgaacggctacctgcccaggctccagctcatcaagcagattcaggacggcaacgccaatgtcatttacgctcccaagccccaggaggtccagcgccccctgccagcctatgaacgtgccctggccagcgtgcgcaagggcatgagggaggtgattgaaggcggcacgggcggccgcgcccgcctgtcctattccagcatcgccggcaaatccggcacggcccagtggggaccggaacgggaagacaagcgcctggcgtggttcgccggcttcatgccctgtgacaatccccgcttcgcctatgtggtgctgtatgaaggccgcgcccacgaacggctgggcgggggcgccgctgccgcccccatcgtgaaggaattctttgagacggagaagaaggacatcaaggccatcattgacccgcccaaggacgacatcccggtagcggaaccggtggaggaaaccccggaaacggctgccgccgcccttcgcgaacgcgggggatcgcctgccgtagtgccggacaatctgccgcccggcctgtatgatccggaaggaatggagcccatcaaggttcatgaaatccctgccgatctggacgactcttccgatgcggaaatcaaggcgaccccggtgggcggttcctccgggcatgccaggccgtccgcgccttccttgtcggaggagccttccgccgcacccctcacgccccgacgcggagattccgactacattcccggccttccccatcagattccccgccatctcaaccattcctctcccgtaagagctcccgcgccgcaggccccccttccggaggatgacattcccatggcggaacctctttagaccggcttttaaggaaggcggaatcgtccggcaatgcttttcagggcgttcgccgtaacagggtcatgcatggcctttggcccgttaatgcttttcattgtgcttgcgtcattgcggggaagcgcctatataatgcggatggtgcgcgtcgatgagactgttgccgtaaggagcggcgcttttgttggatggcatcatgacccccacgtttaaagataatgaaaacgcattatttctactccataccctgttttgcgctgacctgcgctcttgccgcctgctctgacgacaataaatcatcttccgccaaggccggacaggatgccgccggcttaaccccggcttcttcgcttgatccctccgctcccgttgcctccgatctggtggcgaagcgtgcggaacggctcggaatcgccgccctctttcccatggacatgggtattgtagccggtgtttacgacgtccccggcatgatcaggagcgttcagaatctgaacatggtcaaaacctggggttcctgctccgctggggaagacgctgatgaatccatagccattccgggagaggatgcacccaagcccgtccggaaaaagtgctccgtcaacacccccgtcattgacgcgatgatcggcttcggccccgaatgggctccgtggatggatagcgcgcagcccgcttttaccggcatggggctgaaccagatgcagggaattttgtccgcttacaagcttttccaggcctccgctgatggaagcaagggcgccagtgacacggcccaggaggcaatggtcaacaggtacgttgagatgcttatccagtgggctgatttggtggatctgcgcccttccgaggctgctacggcgcccgtgatggtagccgccaaattgactccggacgccctggcccaggccaaggccaccctgaaggacgccaacctcccggaggacatggaacttcatggactggtttccctgtatgacaagacctacaacggcctgccctgcaaggtggcggaggtggactgcaagaaagtgcgcgtgaagctggaagaaaagttggatgaggcaaaagccaagatgaacatctcccaggaaaacctggaccgtctcaaggcggctctcaagcgtctggacgaatccaagctgtatgtggccgtcgctttcgtggatgataccctggtgggctttataaccaccaatcctgaaaagcaggtccgcctggcggcttccccccaggattctgttctggcgcgtccggatttctccatggctgacgcccagctccagtatcccgcctatggcctgatatttgcggacaaggcttgcgccaagggccttattaacctggacatcgcctactacaagggcatgttctccgggttgaaggacctgatgcagacggtaggcgccgactggaagattgccgatctggctccttccatggccgcgcttgattccatgaagggcagcctccttgggctgtatgaaaaggtggcgcagaatgccacgcccgtttcctactacgcgtggcaggaccagggagtgcatgtggaagcctgcacgtatccgcttgaattctacctcctggacgctccctcctccatgaactccgtccgtcccggggcggatacggtgctgtattcttccttccgcatcaatccgcagattgttgacatgggctgctccctgtatgagaatgttgcccagatcgtatgggattacggcaatgcgtatatttccaacccgaagcatgacgtaagcgaccagatccgcatggttgctcccatgctccagatggcccggcccaccattgaagaactttggaaggcgtataagaccgcactttccggccttacggattccggcgtgttcatcatggacatgcagggcgctcccagccccacgctcaagaatgttccggccccgcgcttctccgcggcttatgaagtgaagaaccgtgccgccttgggcgaagcgtggcagaaagtgtctgacgccgccaagaccatcgttaccctggccagccagggcaagatgacggaattgccctcccccaaatcctccgtggaaggggatgtcaccacctacgattacgagtgcccgctgggcgccgacctgaatccggtggtgagcgtttccgacacccgctgggccatcagcatgccgaaggccttcggcatggaagtcatcaaggaatccatgaaggccccggggcaggtggctccgctggaatcccagcttaacctcgtcccggtccgtgacgccctgaagagcgcggcggaaggcaacaaggatatccggaaggccgtggaaaccctggacgtgatcacctccgacgtcgcgggcgtgcatgctacggggcgcaaggccgcggacggcagggacgtgtaccacatccacgttatttccgctgccaaataacaggggtttcccattggatttacaggcttccgggaagaaatttccggaagcttttttgttgatggcggaagcttcttgttcctgccgttctggaagttatctccggaaaaattttttaatgcccggaagaaaaaacggagttttgcaacggcaagcctgccgccgccttaagattatatacaaatgtatataatttgtgcgcgtgccaagttttgggcttgccaagggggaggggagagtacacaatcaaaaccgtcaaataaagggaatggcttcccttttcccgtatttacaggagttggcgcgataatggtgaaagatagacgatgagcagatttttccagttcctgtggttggcggcgttggcggtgcccggcatgatgggcggcagcgcgtgtgcggcggaggaaggagcggagcacggactggagcaggccgccccccacttgttctccattccgcttccaggcggcattgaactgccggtgtccaactccatgctgatgctctttctggcggttctgctgataggggtggttgtatggttcgccacccgcgccatgcgcattctgccgtcccggttccagaatgcggtggaatacttctttgagactctgtacaactttgtggaatccctgctggggccgcgactgacgcgcaagtacttctggtacttcggaaccatcttcaccatcatcctggtcagcaactacatggggcttctccccggggtagggaccatcacctataacggagtgccgctgttccgcggcgcgaatgcggacatgaacgtgacgatgttcctgggcatcttttatgcgctgatgtggctttactggtccatccgggaacagggcctgaaaggcttcttcatccacttgttcgggcccaagggaagactgcccggcttcatgggattcgtgctggtgctcatctttatcttcgtgggtctggtggatgtcctgagcattacgatccgtcctattgcgctggcggcccgtctttacggcaacatttacgccggggaaacgatcattgacaccatggcccacatgttcggacccgtcctcagcgccctgtgcgtactcccgtttctggcgattgagctgctggtgggcttcatccaggctctggtcttcctcctcctgacggcgattttcctcaaactgcaagtgggggacggggatgcccacggccatgccgccaaggatgagggaaaagaaccatccgtgccggacagcctgccgtccggaaaggcctcataagccgcaccgccaactttccgttccggaccatgggcaacctgtgggggaacgttcaacaaaaaacataaaccataccaataacatgattgatcctaccgcaatgacctccctggccgaactgtccggcaacgtgggcttcggcctcgtcaccatcggcgccggcctcggcatcggcctcatcggcgcgaaagccgcggaagccaccgggcgcaacccgggagcctcctcccccatcatggtgattgccattacgctggccgccctgattgaaggcgtggccctcatctccatctttgtgaaataacccggaggccccgttcccggagggagcttcttccgctccggggcggcgcagccgttcctgccggtccggaaaacttccggcatgtttcaacccgttcattttatgctgaatctcatagccgaccagtcctggaatccctttgcgcccttcggggtgacaagctgggaaccctttgttgccaacctgatcgccttcatcctgatggtggtgatcctgcgctacctggcgttcaagcccatccagaacgttctggaaaaaaggcgccagcgcattgaggagggagaggaaatgcgtgaggaaagcgagcgccagctggcttccgtgaaggaacagacgcatgaaatgctggtggaagcgggcgaaaagggacaggaaaagatagacgccgccaaggccgccgcctcccgcctgctggaggaacaggaaaccgtggcctcccaaaaggcggaggaaatagtcagaaaggcccggcagcttgcggaactggaacagcagaaggaacgcgaagcgctgaaagaacaattcggccagctggtggccctggctgccgcccaggtcaccggaaaaatgctgacggaagaagaccagcggagaatcaaccgggaagcgatcgacagcctggattcctgatacgctttatgaagatcggaaaggacacgctcaatgccgcccgcaggctgttccggctctgcatggacgggaataccgtggcggaggaccgcgtgcgcctgatcgcccggaaaattgcggaacgcaaaccccgtaactatgtcgctctgctgacggccttttcccgcatggtggaatacaccgtgaaaagccgtacggccaccattcaaagcgccgtaccgctgacagaggaggaacgctcccaaattcaagccaagctgacggccaaatatggcgacggcctctactaccactgggaggtggcgccggacctgctggggggcatccgcatccaggtgggggacgacgtgaaagacggttccgtacgctccagaattgaccgtctggccgagatggcccgcaatctttccaattaaccaacgaaacttttttccatgagcaacatacttcaagaactcgaagcagaaattaaaaaagccacggcttccgtcagccaggaaaacgtgggcgttattcgttccgtgggggacggcgtcgccaaaatcgaagggctgagcggcgtgatgctcaatgaaatgattgagttccccgggggcgtgatgggcctggcgatgaacctggaagaacatgaggtgggcgccgtgattctgggggatgattccaatttgaaggaaggggacttggtcaaatgctccggacgccttctttccgtgcccgtggggcggtccctgctgggccgcgtggtgaacacgctgggagagccgattgacggcaaggggccgattgaggcggaagcgtattatcctgtggaaaaaatcgcctccggcattatctcccgccagtccgtcactgttcccgtgcagacgggcattctgcccattgacgccatgattcccatcggccgcggccagcgcgagcttatcattggggaccgcgccaccgggaaaaccgccattgccatggataccatgatcgcccaggcggaccagaaccgcctggcggaggaaggcaagctgccggaccaccagcccctttacaacatctacgtggctatcggccagaagcgcgccaacatcagccgcctcgtggcaaagctggaagaaacgggcgccatgaaatactccatcgtggtggcggcctccgcctccgaccctgccgccatgctgtacctggccccgtatgccggctgcgcgatgggcgaatacttcatggacaagggggaggacgccctcatcgtctacgacgacctctccaagcatgccgtggcctaccgccagatttccctgattctgcgccgcccctccggtcgcgaggcgtatccgggggacgtattctacctgcacagccgcctgctggaacgcgccgcgcgcatcaacaaggaacacggcggcggttccctgacggccctccccatcattgaaacgcaggccggggacgtttccgcctacatccccacaaacgtcatttccatcacggacggccagatattcctggaaacggacctgttctaccagggggtgcgccccgccattaacgtgggcatttccgtctcccgcgtgggttcctccgcccagacgaaaatcatcaaaaagctggccggctccatcaagctggacctggcccaattcacggaattgcaggccttcgcccaattcgggtccgacctggaccccagcacgaaggccaagctggcccgcggccagcgcatcgtggaactcttcaagcagaaccagtatgaacccaaatccctggggctagaggccgcggacctgtacgccatgcagaaggggtactttgacgatgttccggtggacaggatcaaggaatgccagaacgcgtgggaagccaccatgaaggaccagcatccggacctgttggaaagcatcctgagggaaaaggatctgacgccggaaatagacgcggggcttaaagccgccattgaatccttcaagctcagttggaactaacgattacgggagcactgaaacatgggcaacctgagagacatcagacgccggatcaaatccgtcaaaaacacgtcccagatcaccagggcgatgcagatggtggcctccgccaagatgcgccgcgcccaggaccaggccgtgaaggggcgcccctatatccgcgccctggcggaagtgctctaccatctccaggatgaaatagacaccagcaacagccccctgatgcagacccacggcggcgcggacctggtgctgctggtgaacacggaccgcggcctctgcggcggcctgaatgccaacctcatcaaaatgacccgggagcacgctccggaaaacgcccactacatcaccatcggccgcaagctgaacgccgcgctggccaaatggaatgaacggctggaagccacctggagcctgacggacccgctctccctgctggaactgaagccggtgttcgacttcattgtgcagaaattcaaggcggaggaatacgggcgcgtcttcgtagccttctccggctttgtgaacacaatggtccagaagcctatcttccgccagcttctccccattgaaccggaaccgttgatgaagatggcgaaggccgggggcgcagccctggacggagaagacgcccataagcaattcctgctggaaccgagccccgccgccctgctggataccatcctgcccctttacgtcttccatgggctggtccagatcgtgctggaagcccgtgcatccgagcactccgcccgcatggtcgccatgaagggggccacggaaaacgccaaaaacatcatcgacggccttaccctggattacaacaaggcgcgccagacgcaaatcaccaatgaactgctggaaatcaccacggccatgcgcgccatggaataacgtggactccgcttcttttacccctttttcaaacaaaaccctcatcccttccatttcaacaccaagtttttctcatgatgaataacacaggcactctcgttcagatcatcggcgccgtggtcgatgcggatttctcccaggctgaaacgcttcccgccctgctcaatgccctggaagtggactatgaagtcgacggaaagcgcaagaccctggtgctggaagtccagcagcacatcggcgacggctgggtgcgcgccgtggccatgagttccacggacggcctgcgccgcggcatgcgcgtgcgcgatacggggcaccccattgaggtaccggtggggcagtgcgttcttggccgcatcttcaatgtgctgggtgaagccgtggacgaacgcggcgcgctctcctgctccggcatgaaaagcattcaccgcagcgctccgccgctggacgagcaatccaccagcacggaagtgctggaaacgggcatcaaagtaatcgacctcatctgccctttcttgaaaggcggcaaaatcggcgccttcggcggcgcgggggtgggcaagaccgtgctcatcatggaactcatcaacaacattgccaaggcgcgcagcggcctctccgtctttgcgggggtgggggaacgcacccgtgaagggaacgacttgtacaatgaaatgatagaatccggcgtgattaatctggaaaagccggaggaatccaaggtggccctggtatacggacagatgaacgagcctcccggcgcccgtctgcgcgtggccctgtccgccctgacgatggcggaatacttccgcgacgaggagcacaaggacgtacttctcttcattgacaacattttccgtttctcccaggcggggtcggaagtgtccgccctgctgggccgcacgccgtccgccgtgggctaccagccaaacctggcggaggaaatggcggaccttcaggaacgcatcacctccaccaagcacggttccatcacctccatgcaggccgtgtacgttcctgcggacgacctgacggacccggctccggccaccaccttcgcccacctggattccacggtggtgctggaacgctctttggcggcccaggggctcttccctgcggtagagccgctgtcctccacctccaaggccctggctccggaaatcgtggggaacgagcattacgaagtggcgcgcggcgtgcagatggtactgcagcgctacaaggaccttcaggacatgattgccattctgggcatggacgagctttcggaagaagacaagctcatcgtgagccgcgcccgcaaaatccagcgcttcctgacccagccgttccacgtggcggaagtcttctccagcattcccggcgcttacgtgcccgtctcggaaaccgtccgcggcttcaaggaaatcctggaaggcaagctggacatggttccggaagacgccttcttcatgcgcggcggcatagatgatgtcctcaaggaagccaaataacccttttcccgccgttccaaaccatgagcatggagttcaaagtcattaccccggatgaagtggcggttgccgccaccgtggaatacgtttacctgcccggcagtctcggggagatgggcgtgctggaacatcatacggccctgattacctccctggaaccgggggaactccgctacaagcccatggacggccctgaggaaagcatggtggtgggcaccggctttgtgcaggttaatgacgaccacgtcctgatggtgaccgacctcgcgctcaactcctcccagattgacgaaggcagcgtggaacgggccattcaggaagcgcaggaagtgttgaaggcccgctcggaaatgtcccgcgaggaacaggcccggtttgaggcgaacctgaccaagcagatcatgatgctcaacttcaagcgcaaacacaaatccccgggcagatgatggcggaagactggaacgacacgttttacgaccttttccgcgaggcggtggggcgttaccatgaaggccacaggaatgtggacggcttctttacggaccaggaaatcatcttcctgtcctccatcggctgccgcacgcgggaactgtttgactttgtggaactctatgcccgcacgggagaaccttcccccaccacggtactattgatggccgcggcgcgcagggacttcttcctgaccatccagcacgggcagttttaccagggcaagcccgtcatcgggtatgacctgccgggcttcggggatgaactcagcggccttccctaccttccgcgcctgattgccaaggcgcgggccaagctggccggctccatgggggatgacatcatctactgctgtgagaacgaccgccgcttcttccgggaacacggcaacatccatcccgctgacttcctgcgagtggtctgggccgcgggagacagtgaccccaaggtgtacgactacgtgcgccagtgcacgctgagttccacggccaaaccggtcgatggtgaatgatgtttctgcatcgtgacggtgggaggaggcttggtgaagcagagcgtctgtagaactgacgttcggttagacggtgcttccagggaaatcttataggaggaaagaaagttcgctgaccggcggtatctagcgtcctggatatggatgatcagatgtcttgtgcttgattgggactttaaagctggtcgctggaaaaatctgtattgtcgccttgattaatcaagagaatcagaagaagtattatgtattttacgaaatacctatgttgataatattatcgtgtatttgaataccataacgttcgcggcgtgtttacactggtaattcttgttctcatggtagttgcaaccattgaaccaacatcatttcattgccatgaacaacactttcaacatcggcgccatggacaccgtctaccccttcattcccatgtaccccaacgggcagccccagggcaacttcctggtcaacggtctcaccgctcccgtccttatccccaaacgaactgcttcctcccccacccggcacgaatggttcggatacctcaaggtcatggctcccgccacctgttttctccaccttcacgccctctcctccatttccctttccattcccgccaaggatctggaactctccacggaggccggatcttccgctcctctctgtcgccagatccagttcgaacagggatactactggtgccatatcgtccaccaacaccagcctgccgcggaggaccaacaggagttctgcattgccttaatgtgcgacaaggaaggagagcccgacctggattattacctgctggcggaaaacactcccgccggcaaggagggagaaaccgtcctgactctggtcaacctgtaccaggagatggaagaaggagattcgtcgagcagttcggcagggggaggagattcgtttgagtttgaccccaagtcaagcagcagctccagttcctcttccagcagttccagctcttcctcctccaacagctcgtcttccagctcccagcagagttcttgggcacccgagcttccggattcttcttccagttcgtctctatccagcagctccagttcttcctcatcttcttccagcagctggtcgtcttccagtttccacagcagttccttggtgcccgagactccaacttcctccagcagcgctccgtcttccagctcttcctcgagcagttccagcagttcttcttccagttcgtcgtcctccagcagttccagttcttcgtcctcaagttccttgagtagctccagctcttcctcgtcaagcagttcttcctggtcctcgtcaagttcatcgagttcttccagctccagttcttcttccagcagcagttccagttcactctcttcttcctccagcgagccggaggaaggaggttgcccatgtccctgttcctgtgattgcgacgaagacatcgaacagtccgattgcagcaagaacacctcccatttcttcggcggcaacccggatggagccgacgactgcgaaggactgcttgaagtgggcgagggcgattccggaggcggaagtgaaggaggtaatcccacgctttcccgcacccttgccgaaccttccgccccctcttccatcaccctgcgctacaagcatcccctcgaatggaccgcctcctgcaatcccgaaaccggacagatctccgtcaaacgacccacgggcagttccatctccttccagagttctgacggccatgccgaagcctccgtctccggaagttcgcgcaagttgaactacaaggttcagaagctgaatgccgacaagtctccctgcaccagcggctctcccgcctatctggacatggtccagagcaatgggcgcaccctgcgcttctcggcagccaccggaaaggtcgtctccatggtctccgcctccggcgtggaaaccacggcggaagattattcccgtcagatgaaggtgaaccgccatccttccacgggagccattcaaagcatctggtccaagtcccagggactgctccaggcggttggggaaggcaacaggctcaccctggaatggtacgatcccggccaggtgagcaagaatgcgcgcggctttgccggcaccggaactccctacaagacggtcagctatgaattgagctccgaccagggcgtgcaggtgatggatatcgccgaacagagggaagggatgcctgtcttccgaacgcagcgaaggacggagggcaacaaggtgacgaccatccagggagagggggatgagcgcaccgtgcgaacggtggagaaaaacgtgctgcccggaggcaaatgggaaatgattgagagcttgcgcggcatcgacgatgaaacgccttcttcctgcacgcgtacagtcaagaagtacaccgagggaggctggttgaccatcagcagcacccagggctacaacacacctttggctcagactacgctttacacctacaacgaccagttccgggtgtccctggagatcaagcccgatggagggtacacgcgctacgagtacgacgagcagggacgggtcatcttgcaagccactccctgggccggtggcggtgaaaaggggacacgcacgacttacgccgacttgcgctttaacgacttcaggccagccacggaaaccgaggtggttattgccgaggatggagaagaaacccaacttctcaagcgcacctacacgtatgaagacagcccgcaggccacccggaccacggtgacggaaaccgccctgggttccgaccaggtccatgcgagcatttcggaaacctatggtgaaggagccgaatacccctacgcccgggggcgccagaagatgatccagggcatcgacggtgtccagacggtctacacctatgaagccgctaccgaatacggagcgctccacaaggtaacggcaaccgtacaggcccatggaactattgttcccgcgcaaagcaccaggagtgtacactaccttgctgaaaacggcaccaccactaggaaagaacaatacgttcacaccgggaaagactggtctttggtctcatcggaggactacgaatacgatgccgagcggaagttgatcaaaacgacgaggggcaacggccgcttcagcacgactgagtggatgtgctgtgggccgttgagggaaaccgatgaagacggcatcaccaccagctatgggtacaactcggccaagcagctggtggaaactattcgtgcggcgacggaacccacgcctgaaatgattacctcctacagctatgatgcggcgggaagaaccatagccacacgacgggatgtagggcccatgaccacggtggaaaggacggagtatgacaatttgggaagaacgattgccacgacggatgttcttggtcgcgtgactcggactgaatacagcgaagacggacttaccaccacggttaccactccggcaggggccactctggttaccaaaacctattacgacggcactgtcattctggagggaggaaccggccagcgagagatggagacccggctggagctgacagaagaaggcatcctgaccatgaccttgtcaaagggggtggtactatcccggactttagaaaacggctttggacagaccatcaggcaggaacatcccaatactctaggagattttatcgtcactcgaaacttctacaatgccaaggggcaaccggttcgttcccatatggaagacatggcctctacagtcaccgtctacaatgaactgggacacgccgtgaggcggaccgtccagctggacgacctccatccggatgatccctctagaaacagagtctcggaaaactcctcctgttaccggctccgggaagacggcgtctaccaggtgcagacttctaccacctataatgccgacggacttcccctcactcagatcacggaaaacatggtttcacagctcaatccgctgttggaaaacaaatccattacccaggatatttacggacatcaacatgtacagtggagcgaatacaccgacccggtcacgcgtacgcagttcagccggattccgacttcggagatcacggcggaatccctggtcattgatggttttacagtgagccagacgaaccatgcgggcattcattcctcgcaggaacgctcctatacctctacaggcatgattctgcatcagacggatgcccggggcaacgtcacaacgattgaaactgacttagacggacgaccagtcaaaaccacggatgcagccggcaacgtaaccaccaccagctaccttccctgctgcgatgctgtggcttccatcaccgattccatgggaggtactacttgctattcctacgacatccagggaagaaagatagccgaatacggcacgtccatccagccggcctgtttcgcctacgatgaagccgatcgtatggtctcactgaccactttcagggtggacgaaggggacatcaccactgatccttccggctgcgccgacggggacactaccacctggctctacgacgaggccacgggaatggaactgaagaaaacctatgccgacggctcctgcgttctcagaacctacgaccagttcaaccgtccggaaaccgtcaccaaggccagaggcattgtcacgacgtacgcctatgctccattgacaggagaacttgtctccgtctcccacagcgacgatactccgggatgggagttctcctgcaaccatctcgggcagatgacttttattcgggacgcctccggcctccgggaactttcccatgacagttacggcagaatggttcgggacacttcctttggaacggtagaaagcagccttcaggaagaattcgacacgttcggacgttccgctggctaccgcctcatgaccggaacccgcacggtgcagcactcccatcttgactacgatcggaaaggtggcatgattgggatgaatctggatggtttggcctcttccttcacttgggaatacgatgaaaccagcggcttcctcaatcggctcacctaccccaacggcatggttcgcagaaacatctaccatcccaagctcaacctcgtggcttccattggctatgagaaacagggaaatggaggcatggccgccggtcatgaataccagtatgatgccctgacgcgtccagttcaacgccgggactcctgggatgccgcccttcctgccacagtaagagattttacttacaacagccgcagtgaattgactggagatcaactcagggagagaggcagctacagctaccggtacgacaacatcggcaaccgcaagactgcacgggaactggaggaagaagtatcctacaatgccgactgtcttaaccagtacacggacattaccagaaatacagaaccattcattcccacttacgatgcagacggcaatcagaccagaatcaagacttctaccggcatttggaaagtgagctatgatgccaatgaccgccctgtaatttttaccagcaaagacggacggactgtccttacctgcggctacgactaccagggaagacgcttcagcaagaagatcaccgtcaacggcttaacagccagccattgctggttcctctaccgcggctatttgcaggtggcccaactggatttgatgcgcccttcttacagacttgtgaaaacctatctgtgggatccgacggaaccgatggcctcgcgtatcttgatgatgaccaactggaaggataatggtacgggaataaaggaacatttttgcttcatgcacgatgctctgaagaacgtcacttccatcttcgactgtaagcagacgcgaagggcgcgctatgaatatgccccccttggagccctaatcacggcgcagggcgacagggctcaggaaaacaagttcaggttttcctgcgagttcatggacgacgagcttggcctgatctactacaattaccgctacctgaatcctacagacggcaggtggattaacagggatcctattgatgaacaggggggagcaaatttatatgcattttcaagaaatgctgtgataaataaattagacttattaggattaaagcctgctttgatggatgattatgataatgcaacaaaattcttgaaaaaagaagtatctaagcatattttagctgcactaagtaaaattattaaaaaagcaaattttaagatgttaagtggcaggcaaactgtcgagcatggaggagctttatttagaaaaaaaacagctaattcctattcatataaagtaagtaatcacgaagcagagagtaaaacatatcaccgccaaccagaagtagctccaaaaaattattgtgaagtagcaatttggcattctcacaatatcgtattcaaacacgatggtataaatgaaaaaacaggattcgttctaggcggaaggttggaaggcgtatttggacctggttccctttctccagaagatgaacgtactggatatggatttgtatgggctaatggacatagagttcctaaaatggacaatcctgaaagtgtccctgcatatgttattcaaagtactccgaaaccagctcgcaaaactctcagactaaaaacgttggatcaagatataaaaacacaattctcagaagaagatttcacagctatcttggtagcgcgacagatcgatgaccctcaatcaaataaagaagcaaatattgttattttagatgaacacggaaaacctttactaccgaagccacgtcctccgaaacctgggaagactaggtactaatatcttaataatatatttatgtttaggttctttttcgtggggggatgatcacctgcgagagtcttctgtaaacttagatgatatatttgtatcttctacagattccagcagcaagagacttaacgatagtgatatacagattttttacttggtgagtgatccatgttggggaaatttggaaaaagataagaacaacttgttggaatcagaattgcggaaaatctatcctgaatcaggctctctctcatggctggaatttcccatatcaccggatttgcccagtaacccatatggcattaagacatggaggatatgtcgccagcaactcctgtatcggcattattacccgttcacgcatttctggtatgaatacctaagtttaatgccctgctggatgtacagtttgactgattatatcaatgctcctgaactgcaagccatacaactattgccatgtcttttgaaacagctttcagataccatgagtctatttcaacattcaccgagaagacttggaatggagtgggtagatataggttccttgaatatgcaggaatacggaggaaccctttccatgatccaataccaaaatatgccatgggttgccttatgttcatatttcaccggcagaactgatttgaaagacaaatcatggcttgtgtggtgcagcgagtatattagtcgcgtagtcagaaaatatcagtatttatatagactgatttataatacgtctgagtttgctcatcttggggtatatgagcaattatggattgcccatcaattcaaagcaaataatgaattaaaaaataaagataataataattatttggctgatcagtttgattcgaagcggttatggaatatattattcccgaaagattatcccgacagcatccggattttatttttggatttccaatatacagctgggttgtcaattcgcgggaagtatatttattacgccatgatcaaaaatgataaaatgcacttgttcaatgatttattttttcacaagacattgccgattccagcaggttacgagcaactggaacatcaatatgggttgcgtaaattatctcaacaagagtattgggaaatggctcttagtttggatggtgtcacaagaggtcttatcatttcaaatgatctgttttcaaaaatgaaaaccttgttttcccaattacgttttcaacggaaaaaagaaatatcggattccgaactattttatatccgaatgcccaatgatctggaatggaaaaaaagttcatccattgtgaatgatgaaaatttaaccaaatcccaggatatgatcatggatattgctcttattctgcattcggagtttttacatcaatttgtgtatccagttatatcggatgaaaagcctgaagtacaatagatactttaaagtaaaagtaatgaagaaataatgtctgtggatagaggcggtaaaccgcatgtgacaagatcggcgttttcttttaccggctctcctatcccaacgccatgcttcgcagtaatatctaccattccaactcaatcttgtgaccgccatcggcaacggtcaggatggaatggtcaaacaatggccacatacgaatgccggtacaactccctgatgacccgctggaagaatgcagaaggtgagcttttatgataatgacgtattctgtttttcgctgggaatcaattccagttggcccagggtgtcggggcgacctttcaaggccatgcgcttgaggtgcttggcgaaggcggggcggcggtggtatttgccgacgacttcgcccgttgttttcaggcgcaggaggtacttgtacgtggtgacgcggatggcgtccggtttggcggcggcgcaggggacggcccctatttcccggcagatttgtttccaccgcgcgccgtgggtgcgttctccgtggcgtgtccaggccagggcgtgggctatctcatgcagaatggtgtcacggatttcatggggggcttccagattggcgcggacaaagtggacggagagggagatgcttttttccagcaggcggcatacgcccagcctcctgcgggcgcggtcccagccgaatttccagtccgggaggcccagttcatccattttcagccgggcataaatttcaatgtcccggaagctgtcgcggttgccggattggaggttcccgatggtcatgctgcggaggaagcatagcacggaacgcggggaaggaaatacggagaaggtcatcatgacggagttgccgcggaggggttggcttttttacggaacggccgtttttctttgcaggaacgcggaaaaagaaagcatgcggaaaggttgaagggaggggctccgtaatagggaatatcactatgagttcagcttccggtaccaagccgcagaggattgcggccattgacgccttgcgagggtttgacatgttttttctgaccggaggcttggcgctggtcgtggccggcatcaatcttttttatgaccagagccccgcatggctggtgaagcacagcgcgcacgtgaactgggaggggtttgcggcctgggacctggtgatgcccctttttctgttcattgtggggacagccatgccgttttccttttccaggcgcatcggcacggtacccatgtggaagatttacctgaaggtggccaagcgggtggtggtgctttttttgctggggatggtggtgcaggggaacctgctaagttttgaaccgtccaagatgtccctgtactgcaatacgctccaggccatcgcctccggctacttgattgcggctatttgccttcttcatctgtccatccggtggcaggtagtggtaacagggttgttgctggttgtgtactggctggtcatgaagttcgttcctttttccgaccccgtagtgggttcctgcacggcagggatgctggaaccgggacggaacctggcactgctgctggacaagtacctgatgggggattggcaggataagacgaattacgcgtggattctggcccagttcggctttggggccatgaccatgctcgggctgctgggcggccagattctgaaaggggtgcaggggcacgggaagaagctggcgtggctgcttggcgcaggtgcgggctgcctgattctgggatatgtctggagcctggattttcctatcatcaagcatttgttcaccagctccatggtattgtgggcggcgggatggtgctatttcctgctggccctgttctacctgctgacggatgtgctgaaactgaactggctgacgttctttttttccgtgatcgggagcaatgccattttcgtgtacatgtgggcggagctgtgcccccccacgcgcaatttctcccgggtgctgttcaccgggttcagcgagtgtttcggggatgcggaccggtttgtcttttatttgtgcaattacgccctgatttggggcgtgctgtattacatgtacaaaaaccggaccttcatcaaggtctaggcttgttttcagccctccgttcatagtagggtcttccgcgtgcgggctgcgctgccgcgtggagcgttttccgcggggaccggcatgcctgcgccgggcgttcgtcatgagccggtcctttctggagccatggagattcctttcaaccaacctcacaaacacggtcccgaactggattacatccgggacgccatccagcgtgcccatttatgcggggacggctattatacgaagaaatgccatgagctgctcatggagcgcaccggggccgggaaggccctgctggttcattccggaaccgcggctttggaaatggcggccctgctgatcgattgccgcccgggggacgagattatcatgccttcctatacgttcgtctccacggcgaacgcgtttgttctgcgcggcggcgttccggtgttcgtggacatcaggccggatacgcagaatattgacgagacgctgattgaagcggccatcacggaccgcacccgcgccatctgcgtagttcattatgcgggcgtggcgtgcgagatggatgcgattatggagattgcccggcggcaccatttgtacgtgattgaagacgccgcccagggcgtaggttcctgttacagggggcgcagactcggttccatcggccatttggggtgctacagcttccatgagaccaagaacgtcatttccggagagggcggcgccctgctggtgaatgatccggagctgatggagcgcgcggagattatccgggaaaaaggaaccaaccgggccaagtttttccgcggccaggtagacaagtatacctgggtggacgtaggctcatcctacctgcccggagagatgacagccgcctatttgtacgcccagcttgaacacgggcaggagatcaacggggaaagactgaagtggtggaatatgtaccaccgcgcgctggaacccctggaaaaacagggcgtcttgcggcgtccgtgcgttccggaacactgcgcgcacaacgcgcacatgtattacatcctgctcaattctctggaggtgcgcaccagcctgattggcaaactggcggaatgcggaatcaaggccgtgttccattacatccccctgcattcctcccccgccggggtgaggtttgggcgttgtgccggccccatgccgcatacggaccgcaccagtgaaacgctgctgaggcttcccctgtattatgacctgggggaagagggctgccgggaagtgctgcgggccgggttcggcctggaagagtttgaagaatgatgaagattcacctggtcaacgtgtccgatgtggacgagtccatgcgcatgcagctccgcatatggcgcaattccgacgcggtcagccctttttttctgctggaccaggtgacggaggaccagcaccgggcatggctggaaaggaatatccgcggggaggacgctattgcctgcgtgatttacgcggaccggatgccgctggggctggtgtacctgccctggtttgaccggaagacgcgccgcggcgagataggcatttatctttacgacaggggattcagagagctgcgtccggcctccaccgcgtatgccgggatgatggaactggctgcaacagagctggagctggaacggctgtacgcccggattctggagaataacgccgcttccatccgttttcatgaacgcatgggattttcccatgccccggaagaggacagggagtgcgagaagaacggggaaagaaagcgcgttctgatgtatgtaaaaacgttatgactgatccacaggttcaactgtccattgtggctaccgtgtactgcacgggtggctatctggcggagttctgttcccgcagttttgccgccgcgcttgaggcgggttatgacccctcccgcacggaggtggtgctggtgaatgacggctgccctaggggagggctggaacaggccctgaaggaacgggaaaaggacagccgggtgcgcgtggtggatttgtcccgcaatttcggccaccatctggccatgtacgtggcctgcgaggaagcccgcggagagcgcgtgttcctgattgacagtgatctggaggaagcccccgaatggctggcggatttttcccgggagatggcctccaccggggcggacgtggtgtacggcgtgcaggagaagagaaagggcggcctgtttgaagccgtttccggagagttgttttacacgctgttcaacctgctttccgaccagcagattaccaggaacatggtcacggcgcggctgatgagcgcgcgtttcctgcgggagatgttgaaattccaggaccgggagccctttttcttcggcctgtgcgtttccgccggcttccggcaggtgccgtgcacggtgaagaaggcgtcctcttcccccaccacctacaccttccgcaagaagatggcgctggcgatgaattccgtggtttcctacagcgccaggccgctggtgtacatttcctacttcggcctgggggtcaccctgattgccatgctgtacgtcatctgggtggttgtgcgccagcttttgtacaatgtggcgcctcccggctgggcctcctccgtggcctccatctggctggtcggcggtctgattctgatgagcctgggggtcatcggcatttacatttccaagatttacaaggagaccaagcacaggcccgccgtagtggtggcgcgccggtatgagtgagttcctccgctcttttttctctcatgatcaactaccttattctgcacctgctgttcatcgtttacgccctgaataccgttctggggcggatggcggctccctatagctggacggactggcaccggttcgccctgctggccggcgtgctgttcctgctgggcatttatgcggcagggtggcaggtgatgctgaaaaagttcaatctgggcgtggcttatgccaaccgttccgccgtggtcatctggggaatcctgctggcgtggctctgcctgggggagaccctttcctggacgctggcggcaggggcggtgttgattatcagcggcattattcttgtttccacggaggaggacgcgcatgaatgaggaattctatatcggcctgaacctgttttccgttttcctggcctcctgcacgcaggtgattctgaaaaagtccgccatgaacgaacggctgtccggcctttcctatttcgtgaatccggccaccgtgacggcgtattccattttcctgggctgctgcctgctgacgttttactgcctgtcccatttgccgatgattacagtgaatgtgctggaatgctccgcatacgtgtacattcttttcttcgaccggatttttttcggcaagcccattaccatgcgcaaggtgggcggcaacctgatgattattgcgggcattatcatctgcctgaaccgctgaggcggcgcccatggccttttggtccttccgggctttgcgccggtatcggctcttgactttcattttctccgtttctagtatgcgggcccgggcagggagaacagcccgcaaagtcagggaatttgcttatgttgaaacaggtttggagatgggtatcgctttttccgctgctccatcccgtatggttcaacctgctgttgctggttttggcctggagcattgtgggcgtagcgtaccaatccaatgacgatctggtgattgcgtccgtgcttgacggctggggcgacccctcctacgcggacgctcacgtcattttcgtcaatcccctgctgaccggactgctgctgaaagcggctcccgttctgggcggcctgtccgtctggcccgtgttcctggcgcttgccacgctgtccagcggagcggccattttcacgatgctgacggcgcacgcccgcaaggcgcgcagatatgatttcaatacgctggtcctgctgctggtgtggcttttaatcatgccgggcttttatgccgccctgcaattcagccatgccgccttcctgacggggttcaccggagtgctggtatgcctgaagtacggttcctcctcctggaagggactgtgcacggggggattcctgtgcgtgctgggcagcatgatccggctggacgccgccctggtgtgcgatgccttctggggggccatcctgctggcgggcagtttggacgggtttaaaccgtcccgggaaaagatgcgtgcccgcggccgtctctggctggccctggccggcgtactggcagtctccttcggtctgaatgagtataacaagcacgcccaccggaatgtgctggagggctgtgacgtggcggcgtggaaccaggcccgcgccctcctttcggacacatgccccatcaggccggagggcgcctaccagtgcgaggagtacggcgtgttcgccaacgatatcaagatggtccgggtgttcaccaattgcgatatggacgctttcaacacggattatctggaaaggcttctgctggcgcgggacgggggcgagttctggcccagggcctgggtccgcggggagaaggcccttcatctgttttcctgggattccgtcatggaccttctgccgtgctggattttattcggtctggcctgccgcgtgtctttccggcggggggattccccggctctggtgttctgcgtgggcgccctgctggtgctgattctgctgtacatgtccagcatagaccgcctgtatttccgcgtggtgtatcccacgttcctgattgccgggctgtgtctgctgtggtcggataaataccgccccattcgtttcaaatggaccggaaagggcgccctgacaggcggcgtgcccatgttctgcgcgttcgccgtttctttgtcacaggcgtgcgccgccgtgtgggaggccaatctggagtctttttccccggatgccggccgcctgctgtgcgaacgggtggaccgtgaaccggattccctgttctgcgtccagatgtccggcggcaccattgacgacctggctccgggacagtccgttttccgcaaggcatggagctgttcccggaagaatgtcgtgacgctgggcggctggaattttccgttgaagcccgtgcagcggaagctgaaggagatgggctgggaggggcagtcctccctgaacctgtgcagggacaacgtatatattgtctgcctgactccgcagggggacgtttccgacatggacagcaagttcatggggatgctcagccgccatatatgggagcggcacggcgtacgcacggcctggcatctggatgagaatattgagggcgtgcgcatttaccgcctgcgcaagacatggttccagcccgggaagcaggaactgcctccgtcccggtgatgcgccgcgccggaaagtaaaatcccccgatgcacgctgcgcaccgggggatgaaagggaaattggagctgtcgacggttgttaaaagcgcgggccgccgccgggcatgcgcctgtttgtgcgctcttcacggagttttgcctgttccgccggggtaagaagcaggaatcccaggtcgcggatggcgcgctgtttttcagcgggatccttgatgccggaaatcaggcttttcattttttcaagggcggccacctggtcgccgagctcaaagcatgccttttcccgttcccactgccttttgaccaggaagctggctttttccacttccgccgtttttttgtcgctggcggaattattttgcagcagggtcgcttccagtccgatgcgtttgttccagagtttccggaagttttccacatcctttttttccttgtagggagccagcagcacacggtcgaagatggtgttgaggtccatcaggttgtccggcagggtatccgaacggtagtcgctgatgttcaggtaggagcggattacttcactggctccgcccaccatggggagctgttcgcccacatccttggcgttggcggccacttcatccagcatggacaagacgctggaggaaacgttgagttcgcgctcgttcttctcggcatccgcctttctcaggcacagcaacatccatttgcactggatttgaagggcttttttgaagcctggggccacgttgttccccgtattctgcttgcgccagttggaaaaggcggtgctggggctgtccggcttgctgctgttgccgttgctgcctcctcttcctccggagcccggcatgcgcatcatccggaatcctccccctccgccccggttcagcatgcgggacatcatgctggtcgggttcagaaagcggtctttcatggcgtctacataaagtttcatggcggcgttttccgtgctggtggccgcggtgagggcggtcacagccttctggatacgggcggagctggtgttcaggtagccggatttgacttccttaagccactcggtggcttccttccttgcggaatcggtaagcatttcctgagcctggcagaaaccggagcccaggatgagaagcatcagcgcggaaagcgccggacgtttgcggagcggggtgaagtgtatcatgacggtatgaggttacagggtatttttacaaacccctcccctgaagaaaagttgcagcttttcttcaaaaaaagaacagcacatattgttacggaggaaaaatgtttaccccagcaccttgcggacgcaggcggagcagacggctacggcctcctccatttcctccggggaaatgatgaggggcgggttgaagtacaggacgtctcccagcggccgaagcagcagaccctgtttaagcgcttccttgtaaatctggtatcccagccgccgttcggacgggaagctcttcttggtttccctgtcctccaccagttcaatggcgttcaccaggcccaggctgcggatttcccccacgtgcggatggtcccccagcgcatcggcgatcatctggtggaagaggggggccttttcctgcgcccgggaaataatttgttcctcgtccagaatcttcagcaccgccagggcggcggaacagcccagggggttgccggaataggtatggctgtgcatgaaagcctttccttcccggtagtccgcataaaaggcatcgtaaattttctgcgtggtgatggtgatggacatgggcatgtagccgcccgtgagccctttggagacgcacatgatatccggggagatgccggcctggtcgcaggcgaacatgctgcccgtgcggccgaagccggtggcgatttcatccgcaatgaggtgcacgttataggcgtcgcacagggcgcgcagcttcgccaggtaggcggggggatacatccgcatgcctgcagaaccctggagcaggggttccaccagcagggcggcgcattcatccccatggcgttcaaaagcctcctgcgccgcgtcaatgcattccgcctggcagcaaccgcgtttttttcccctggggcagcggtagcagtccggagcgggtatacgcacgatgtccagcagcaggggcttgtagagttccgagtaaaggtccaggccgcctgcggagagggctcccagggtttctccgtgatagccgtcactcagggacatgaagcgcactttctggcggtttccggtctggtagtggtactggaaactcattttcatggcggattcgatggacgccgaaccgttgtcggaaaaattgaacttgcagagtccctgcgggatttttttcatcagctcctcgcacagggtgatggccggcttgtgcgagaagttggcgaagatgacgtgctccagagaatcaagctggttcttgatggcctggttgattttagggtgggagtgcccgagcaggttgcaccaccaggagctgaccacgtccagatagcgcttcccgtccacgtcgtacagattgattccctgcccgcgttcgatcacgatggggggcagcgtttcatagtctttcatctgggaacaggggtgccagatgtattccagatctttttttgaccagtcggagtgattcatggggaaaggagcgggaaaacgggacagtccttatttcatgcggacttcatagcccagctccgccagcatgtccaggtcttcccggatggtgacgccggaggtggtgagcatgtccccggagatggcggcattcgccccggacatgaagattttcctgccgtggtccttcatggtgttccttccggcggcgatgcggacgaagccgtccggcatgatgaagcgcaccagcgccacgatgcggagctggtcttcctccccaagcggggtcatgttcgcgtacggcgtaccggggatgggcgtcaggaagttgatgggcgcggacttgatgcccagtgcggcgatgtccatgtacatatctatccggtcctccagggtttcccccagccccatgatgccgccgctgcacacttccagcccggcttccatggcccacttgatggtttgcagcttgtcgtcgtacgtgtgcgtggtgcagacgttcgggaagttgcggcgggaggtttccaggttgttgtggtaacgggagacgcccgcggccttcaattgttcgcagtgctttttggagatgaggccgtgggaggcgcagagggagatgctgcagcgttcggcgatgtgcctgtagctggcgcagagccggtccacgtccgcatccgtcagcctcttgccggaggtgacgatggaatagcgcaggatgccccgttcgtcattgtacctggcgcccgccagcagggcttcatcacttaagagggggtattcctccaccgcggtggagtaatgggcggactgggcgcagtacttgcagttttccgaacatttgccgctgcgcccgttgatgatggtgcagaggtcgaagacgtttccgcagaagtgctcccggatggcgttggccgcctggcacagctcctccagcggttcccggctgagggctatcagttcttctctggtgcaggaaccgccctggagcaccctggagaggagggaagaggtcagactcatgcgtcaaagactacccccggcgcggttcacgtcaagggcagaatgccgggggttacgtatcgtggggaatccttccctttttccttatttggtcggctgttccggggccttgtagcgcagggcctggaatccgggcgcgggcttgtattccttgtccaggatggcgatggccctgtcaataaggtcacggttttccgcggcgatgtcgtttttctccgcggggtcttttacgatatcgtacacttcccggttgccgggttttttgccagggaacaggttgcggcggatgactttctttgcgtcaaagcgcacggccacctggcctccgtagccgcctcccgcccaaaccacggctttcctgtctttcagggcggattttttacccagcaggatgggagagaggtctatcttaatggggggaggaaggccgtttttttacatgccgccagagacaggcggcaaaaatcaggagaagggtggcgaggatgatgcagtaataggtgttctggcggtggtccctgtattggaggaggacatgcgcgggcgtgtcggaaacgggaaggggaacgatgatgccgtagttttccgagcattccacgggaacgggcttccctccgttgatgcgtgccgtccagccttcggaatagctttccagaatatccagtgaggaggcccccggcgggacggtgaagtccattttattgtacgtgagccagttggggtgcacgacggcgctttcttccgtggcagggccatttgcaaagtatctgcccctgtaatgcgggttggcaaagaggacgtaccgggaagtgttttccaccaggttccagcctttggtttccgggagctgctggcgcgggttgacgagaaggtgggaaatgcctgccttggcggcggcttccggatgggtcaggatgtcctgaagggcatggagacgtttgggcctgacggtttcatagccttccgcctgtttgatgccgaagctggaaaggtggttgtcgtggaaatagtccttgtccctgtgtgaagtgtagcacaggacggaaccgtcccccacctgctgtttcaggcgcggcagccattcgggttccctgtacaggcctgcggattcgggcttgtccgcatagtggacccaggtggcctgaacgagaagctgttcccccagggagcacagaatgaccgcggaggccagcagcagcttgtgccgtgcgcggacatggatgcgggaggcggcccacaggcctccccacagcagtgcaagcagggccagcgtgcggggataccagatgcacgtttgttccagcaggcgttccgtcctcagcatgtaccaggcttccctgcccgtttcagcgggtgagaggcgggaaacaaggtttctctggagggtggagagaatgtcctggtggaagatttgaatcaggatggagcacagaagccatcccagcgtcaggatgcccagcgcgatgaagattttcttccagaccgttcttgcgggttcctgagtaaaggcatggagctgccacgcggccagccaggaggcgcccagggcatagaccgtggtggaacgggaataaaaataggtgatgaggggggtgaaggccagaatcaggctgatgaccatcaggaattttgccgtcaggggggcttttctgttaaagaggcccagcacggcaaggacgaagatgacgcctccggtgaatttcaggtcaaacaggtcctggcccatgagtttgaacaggtcaatcgtttccggaacgcccaggagcgtggggaacaggacggtgaccagggagggaagatgagtgattccggtcaggaagggaatgggcctgcaaccttccatcaggggtggaatggtctgggccagcacgtctatggagagaaggcccccggcgatgccggacaccaggtagggcagggagacgcgccagagggttttaaacttccagcgtgagggggacgtccaccagtccgccagccaaacgcaccccgtgagcagtacgatgaacaggcacgcctgaaggtggccgccccggaacccgagggcgatgaagaggatggaaggaaggtcgatgattcttttttccctgttgcgcatcagcgcccataatatccacggggcccagcacatggttcccagcacccaccggtggtaaatccacaggacgaattgggagtagaagccgtagcctatcgcccccagcaggcagtagggagccggaacctggcggctccgcaggaagacgatcatgcccagccccgcaaggaagaattgcaggatgatgcccgtgtcccaggccgtccagaagggcaggaagaagtagaggacgtggtgccagtcaccggggcacagcatcgtgttttccgcaatggccgttccgttgtgggtgtacggattccagcccatgtaaccgtcctgccggaagctttgcgctacggagtagttgtagggcaggtattgggagatggcgtccacggtaaagtggttgtggacgttttccatgggctgcgtggcatacggggagatgaggcagtccatgatgtccatgggcgccagcactttgcccccgaagatggccggggcaaagcaggccccaacgaggacggcccagaggaggcagcagagccagaaagagcgccgggagagggagtcagtgtttttcatgcttaagattgcgttcctcccaatgcatgagggagaggacatggtcgtaccgctgggcggaccggaggccgtgaagtatgaaggcgatggtcagcgcgagggccgatacggtgaaaaggcccatggacaggacggccagcggaaggtggaagacatagtcgtaccggaagtagtccagaacggcagggatgccggccagaatggcgaggatgagcagaaccgcgctgatgatggagaagaagaacagggggcggtggttcatcaggacggcgaagatggttttgatgaccttcaccccgtcagatacggtagagagcttggatacggagccttccgggcggtccatgtaattagtggggatttccacgacggaatagccgttgtccagggcgtggatgctgatttccgtttccagttcaaagcccgtggagagaatggggaagtttttgacgaaccgcttggaaaagacgcggtagcccgtcaggatgtcatgcaggttgccctggaacagtttgttgatgagcatgcggacggccttgtttcccgtattatgcatggggcgcttgttttcccggctgtaaatgccggcgtcatggcggtctccgcataccatgtccgcatctccctggagaaccggttccagcaggcgggggaggtcggcggcgggataggtcaggtctgcatccaccattacgtaaacgtccgcatctatttcccggaacgcctttttaatggccatggccttacccttccgtttttcttgaagcagcgtgccggaacagcctaattcttcataagttttcctggctatttccgcagttttatcggaagaattattatcaactacataaatggccgcttccgggcagtgggaatgaaaatcttgcatcacttcccgaatggtcaattcttcattgtaggcggggataatgatggcgatggaaatcatgtgatgaccttttgaaaattgagtatcttgccagagattacggattgcgaatctgaagtcaacatgtttttctgaaaccgaattagttaatagaaaagaccggttgttggaaaagaaatttttctttaatttgaaggtgtggattcctgataaaattctgccttgcaaaagatttcaggtttgcatcaaccgccgttcttttggccggattcgcaatccgctggtttttccattatgaatgaagatggtccctgtcaatcgcgggaccgtttctccgggagaatgcctctcggcaattaaaaccgtgcttcattccggaggcttttatcaaggaagcgaaaggaggaggaaagggcaagccgcatttttctccgttttccctccgcaggcgaaggaaaaggaaagggacacggtttcccccggatgaagaacggttcaggagaggacgatttcctctacagcggcgcggagggtttcatcactgaattggtccagcgcatgtttcagaaagccctgggcgatcatcctgcgcgccgtgtgctccggaatgccgcgtgaaagcaggtagaagatttcttccggagagatggaggaggtggcggaaccgtgcgagcactgcaccctgtccgccaggatttccaggccgggaatggagtttgcttccgcccgggggctgaggatgaggttgcggttgctctggtaggcgctggtatcgtgagcaccttccgccaccaggatcatgccgctgaaaatgctgctggcctcgtcatccagcacattgacgtaaagcaggttgctggaggctccgcgatagaggtgcttttggtaggttctctggtccagctccttgttttccttcaggtggctggcggaaagcaggcgtacgttggcgctgtctccgttcaggaggcagaccgtctcctgcctggcccatgccgcgccgggatggctgacgaggtgctccatttccgcggaatcgtccgccataatgtggcagagctccacggcccgggaacggctgttgagctcctggaccaaagcgtatttgacggaggaagcggaggaaagatggtgctgctggagcgctccgcagaattggctgccgtggtccgcgctgacgtggtgttccaggatgtgcaggcggcttccggtctccgcaatgaccagcgtggcggggaagacggccacgttgtccccggagatgaagtggaagatttccagggggcaggagatttcccggtccgccatgatgaccagaccgttgtgctggagagccgtgttcagggcggccagtttttcggaaccgagcgtttccggcgctgtttccaggtgtttccgggccgcgtccgggtattggagcacaaagtcttccagatccatcacggcgaggccttccggcagttcttccgggatggagacggggaggccgttggcgtaaacgatgcggatggcgtctggcatggaggcatgctccctgatgatggaggccagggcttccggtgccacgggaggggcggcttcaaagttttccagggattcgttgccgggagttccgaaacgccaggattccatgcggcgggagggttccggaagctggcccgcctgttccagggcctggcggtgcctggcttcaaaccatgcgggaaggaagcctgcggggaattgttcttcgttgagcaagtggttcatcatttccctccttatccgatgctgtcttccatttccaggtcaatgagcctgcgcagttccacggaatattccatggggaattcctgaacgaggtcgttaatgaatccgttgacggccagggacatggccgccgccttcgggatgccccgctgctgcatgtaaaagagcatttcttcagagacctgggagacggaagcttcatgctgcaccgtgttcctgtcccccttcaccgtgatggcggggtaggtgtccgtgcggctgttggccgccagcaggagggcgtcgcattccgtgttgttcttgcagcccttgaggcctttgcccatgaccacctggccccggtagctggcgcgcccttcaccgatgctgatggatttggaaacgatgttggacgtggtgtcgtccgccgcgtggatcattttggcacccgtgtcctgatgctggcccgtattcgccagggcgatggagatgacttccccgcgtgcacgcctgcccttgagcaccacagccgggtatttcatggtgagtccggagcctatgttgcagtctatccagcggatttccgcgtcttccatggccagtccgcgcttggtgaccatgttgaagacgttggaggaccagttctgcacagtgacgtactggattttcgctcctttgagggccaccagctccacgacggcggagtggagggtggtggtttcaaactggggggccgtgcacccttccatgtacatgagctccgccccttcatctgcaatgatgagggtgcgttcaaactgcccgaagttttccgaattgatgcggaagtacgcctggagcgggtgcttgagcttcacgcccttgggcacgtaaatgaaggaaccgccggaaaataccgcgctgttcagggcggagaatttgttgtctcccgtggggatgactttgccgaaccaggggcggaagacgtcttcatggtatttcaggccttccgtggagttgacgaagatgacgccctggctgcggagttcctccttcatgttggagtaggcggactcggagtcatactgggcttccacgcccgccaggaactggcgttcctgttcagggacgcccaggcgttcaaaggtgcgctttacgtcttccggcacgtcgtcccagcttcgcttgggccgttcgccgtcggaaagatagtagcggatctgggagaagtctattttttcaatgtccggggacgcccagtgggtgggcatgggcttgctttcaaagacggcaagcgcatttttgcggaactggcgcacccattccggatcgtccttgacgtcgcagatgtagtcgatggtggcctccgtcaggccgtagccggcgttgaatttatggcgttccgggaaggagaagttccccttgctccggtcgaagtcaaacaggttctgtttgttcccgtcctctgacatgtcaggtgtgtcgctcatgattgactgccggattggcggcgttacgccttttccgctccttccgcctctttcaggaattcatatcccctgctttccagttcgtccaccagctctccgccgccggtacggacaatccgtccgtcggccagcacgtgaaccacgtccggcttgatgtaatccagcaggcgcttgtagtgggtgatgacgaggaagctgcggaagggggagcgcatggagttgactccttccgaaacgatgcggagggcgtctatgtccaggccggagtccgtttcgtccagaatggcgtaaaggggatccagaagaagcatctgcagcacttcattgcgcttcttttcaccgccggaaaagccttcgttgacggcgcgggcggtgaatttgcgggacatgccgagctggtccatttttgcatacagcgtcttgtagaaggtaaccgcatccagttcctccccctggggcatgcgggcctgcatggcggcgcgcaggaagttggcgttggacacgccgggaacttccatgggatactggaacgccaggaagaggcccgcgcggctgcgctcgtcaatgctcatgtccagcaggttctgtccgtccagccagacttccccttccgtcacctcatagtccgggtggccgcagaggactttggagagggtgctttttccggaaccgttgggtcccatgatcgcgtgcacttctcccttgggaatttcaagattgatgcctttaagtatttccgtgccttgcactttggcgtgcaaatttttaatgaccagactcatgatgatgaaagggatttagccctgcggcgtgatgatggagcccctgagggtgatctgggcttcttctatgcacacgtcgtcgggcaggttgatgaattccttcagatccacgccctccttgatggtgatgtcgtaaatgcagccggtccgggtgtcctggaagtgcccatgatcaacgagattgggacagaagcgggaagagctgcgttcaaagttgacctgattgaccaggccgtgattcaccagggcttccaggcagttgtaaacggtggccagggagatgctggggagctttttgcgcacccgctggtaaacttcattcgcggtgggatggtctctctgttccaggagaacctggtagacttcctgtcgctgcttggtgagtctcaaaccggaaataaccgggagggtagaggcggtgcgggcggcttgtttggaatctgttttgggattcatatcttatttttcatgctctgcgtggatagtgggggagggtcaattgttttgcaagaacaattcctgttatttattcgggcgcggggaggggtaaaaaaggggcggtcatccctgtggatggccgcccctgcagggagatagagttatctgtaatttagttggcagcctcggagctttccggggccacattgacgcggcggccttcgcggtcaaagaacacgcggccgtccacgagggagaaaatggtgtagtcacggcccatgcccacgcccttgccggggtgccacttggtgccgcgctggcggatgatgatgttgcccgcgatcacttcctgcccgccgaattttttaacgccgaggcgcttgctgcgggagtcgcgaccgttcttgacagaaccttgacctttcttgtgagccataagattaggataaaattaagggttgaaattaggcgttgataccggtgatttccagcttcgtcatggcgcggcgggaaccttttttcttgtggaagcccttgcggcgcttgaatttgaaggcgatgatcttcttgtcgcggaactggctgacgaccttggcggagaccgtagctcctgccaccgtcggggtgccgagggtcacgtttccgtcattttccaccataagcacctgatcgaagcttgcttcagcaccctcttcaagggtattgatgcactcaacgtcgatcacgtcgcccgcctgaacgcggtactgcttgccacctgttttgaaaattgcgtatgccattgctatcactgttaaggttcacccgcggatgcgggagccgcaataaaccatatcaccttcttttagacaagcaaaatttcatgaaaaaatgaacgaatggtataaaatttttaaaaacggccccgttttaactcattctccggaggaaatgagggagctgggatggcaaataggtaaaattttaatgcccggtgaagtgttgggcgtggtgggggagctgggcgccggaaagacgcacctgactcaagggattatggaagggctggggagttccgatgcggcggccagcccgacgttttccctggtgcacgagcatgcggacgggcgcctgcgggcgtgccattttgatttttaccggctgaaggatgagtccgaattgctcggcataggctgggacgagtatctggacggggacgcggtgctcattgtggaatgggccaacctgtttccggacgcgctgccggagggaacttcctggctgctgctggagcacgagggggaatgcctgcgccgggtgtctctggcccctgtggaatgaagcggttcagtagctgatgctcctggagaacgccttgtcaaagccggggctgagccagatggtgttatgcatggcgccggggaattcctggtagttgaccggcgtggagaagcagtcccggagccgtttggcgtggtcaggcgggatgacttcgtccgatcccgccgccaggatgctgacggggcaggctactttgggcgctgccaggtccgaccggaagtggtccggcaggagaagcttgacgggaaggtaggggaagaggccgcgggcggtttccagaagactgtcaaagggaaccagcaggaccagctttttcacgttcctgacggaggctatctgcgtggcgactccggagccgaggctttgcccgaccaggatgacgtcgtccggcgttcttccggtttccttcagcacggagtcgagaatcgccagggaatcccccatgatgttctgctccgtgggcgtgccggtgctgagaccgtatccccggtagttgaccaggagcttggcatgggggaaccgatccaggtagggaagcatcatggagatgtccatggcattccctccataatacaccagcaggggctgtcccttcttttcaataagccagccgctgagctgggccccgttatggtggaaagtgcgccggtggggctcccaggcggcgcgtttttccagatacacggttttgtccttgggctggggcggcaggtacaccagggaacggacggaacactggacgcacgccagggccagcgctccggccagcagggcgctcaggattttccattttcccggtttcagcatccgcatgaggttcattgtccagaattttccgtggtcatggtcccggccgtgccggtgcggggtagggctgtcccccgttcctggcagctccagccggtcagggaggacgttttgccttccgcgtccaggcggcacaccccgctgaggagtatttcccgggaggaggtcttaaagtgcaggacggcgggtgatgttccctgccggtacgtaaccgttgccgtttccggaagagccccgttgattcccagggtgcctctgccgtcacccagggagttgtataagagagtcatgccggagtttgcgcgctggatttcccgtgctggggcaggttccgtttcaccatccaggacaatggccgtgcggctcccgttggggaaccattccgcctggacgttatccgtttcaagcgtggcgccgccgcgcccgcaggcgcaaagcgtcagcagcatgccgggcaggaggaggaaagctggtcgcatggaaagagtgtccccgaatttgaggaggaaggcaatctctcttttctctccatgggcggcttttgcaggaattggaatttttctgatagaagaaaaccggggaaaaggtataataaaggatatgtttaaccggatgttttcatggagttttgtggccgcagcgtgcgttgcgggatcattcccggcactatcccgggggcaggaaggcgcggcgcaatccgggtccgcagccgtgaaagtgcctgccgccagtctgctgatggcccgccaggaggtgggggaaacgcggttggaccggtctttcaagaatggtgaattgagcatcgggggtaaaaaatacgctgcgggcatcggcactcacgctacatccatgattccgctccctgtgccggagggcagcggctcaagagtgtggaagctggaaggggcctgcggcattgacgacggtacggacggagacggcagcgtggaattccgtgtaatgagcggttccgaagttttatggagttccggcgtgatgaagaggggaatgcctgcgaaaaagttttccgttccggtagcggaaaacggcatacggcatctttacctggtggctgaccgggtggaaaataattcctatgaccacgcagactgggtggacctagtctggaaaacgggcggtgagccgcagagcatgaagggagccgtggtgaatgccgccaaattcggcatggttcccggcgtcaggaaagatcagggtccggccctgcgggccgcgatttccgccctgcggaagcagggagggggcgtgctgaacatccccaggggagtctatcatttttatccggagggagccttgaacatgagcttcaatatctccaaccatgaccagcccctggttcatccggtgtgcgtgaccctgactgatttgcggaatgtccgcgtagagggcaacggctccctgttcctgtttcacggcaaggtggttcccctgctggtcatggacagcgaaaacatcagcatcaaccgtctgtccgtggattatgaacggtcctattgtacggaagcgcgtgtcttgaatgcggacgacaggtccacggaggtggaaatagacaaaaaagactacccctatgaaatcaggaacaacaggttcgttttcctgggcgaaggctgggaggaaggaatggggagctgcatggcctttgagaaggggaccgggcacatcattgccaatacgtcggacatgggctggaacggccgggtggaacccctcggagggaaccgcctccggctggactggaacctcaagcagaagggaatcaagccgggggatacgctggtgctgcggaattataaccgcccccatccgggatgcgtggtttaccgggcgcggaagacggtcctgaatgatgtggctctgcaccagagcacgggcatggctttgctggtccagcggtcggaggatttccacatgaagggtggcggcgtcatggtcaggaaagggacggggcgcgtgcacaccgccggggcggacgccacccatttttccaacacccggggcgagatcgtggtggagaaagccttgttcgagggaatgatggatgacgccatcaacgttcattccacctgcctgggcgtgacggaggtagtggacggccatacgctgaaatgcaagtacatgcaccgccaggcggtggggtttgaagtgttcctgcccggtgaaaaaatccgttttatcaacgggcctacgcttgaaccgggaagcaccgctaccgtaaaaaccgccgtgaagaagagttctacggaactggtgatcacgctggaagaaccgctgcctccgtccgtcaaggccggggacgccgtggaaaatgcggatttttacccttccgtagtattccgcaacaacatcgtccgcaacaaccgcgcccgcggttctcttttcacgacgcctgagaaggttctggtggagggcaatttgtttgaccattcctccggcgcggccattctgctggccggggacgcccagggctggtatgaaagcggcgcctgccatgaagtggtgatccgcaggaataccttcatcaacaacctgacctcccgctaccagttcacgaacgccatcatttccatttacccggaagtcaagcagttgaacaagcagaaggattattatcaccgcaatgtcctgatagaaaacaatgtgttcaagacgttcgacgtgccgctgctgtttgccatttccacggataaccttaaattcgtcaacaacaaaatcatttacaacaatgatttcaggggctgggggcagaagcccttccagttcaggaggtgcgccaacatcctgattaaaaataacaaggttcagcctccccgcacatggtccattgaggactgcaagctggaaaatactcccgcggaccaggtgcgcatagagaattgacgtttccctgcgccattccgcctttgctgcggaaagccggcttttgcggatttttcatgctgcaggggccggacggccgtccgggaggaaggcggagttttttacggttatttcaacgtcttgacgcagaacggtgtcattaccggaatgatagatattccttcccgtctggtcaaacgctgcaaaaagttcattgagccgtaccgggtgacggacggcaaggggttcaagttatcccactatgatccgggcgatctgggcaagctggacaaggacagcaagaaggaagccgtggacaagctggagaagggcattgagctgctggaacagcttcaggaggtgctttatgccagcgaatcctatgcgctgctggtggtgctgcaggcgatggatagcgcgggcaaggacggcattgtgaagcatgtgatgggcggagtcaatccgcaggggtgcgtggtcagcagcttcaagccgccctccacgctggaacggagccatgatttcctgtggcggtgcgtggcccgtcttccccggcggggaatgatcggcattttcaaccgttcctactatgaagaagtgctgagcgtacgcgtgcatccggaatttctggcgggggaggggtttgatcccgcccatgccaagggagccttctggaaggagaggtacagatccatcaataatctggaacgccatctgctctccaacaagacgcgcatcgtgaagatattccttaacctttccagtgaggaacagagaaagcgccttctggcgcggctggacaccccgcacaagaactggaagttttcagagggggacatccacgaacgcgagttctgggaccagtaccagaaggcgtatgaggaaatgatacgtcatacttcttcccgggacgcgccgtggtatgtggtgccggcggacaacaagtggtattccaggcttgtctgcatgtgcgccattgtggaggcactggcggaaatgaaactggaataccctaaggtgtccggggaattgaaggcgttcttccctgaattccgggaggaactggaacgccccctgtccggggacagggattgaacgaagagtccgggaacggaagggaaagaaaaaaggccgcggaagaatggcaaaaagaaaaacggcgcatcatgcggaagcttccctccgtctgctgcgccgccgcattccatcccgtgcgggcctgccggttctttaatcagcgcctgcgttcccaggatttcaccttgccgttgatgaacagcacgtagccggtatccaccgggacgtaggtgacgtcattgtaatacgggtaatagggacggtagaaccccggtccccaataggggcctccccagtagggcccggcccagaaggagggcggcggggtgtaaaccggctggagggaagagtaaatccagcgggtggcggattttccgttaaggttgccttccgcgacggcggaggggtctccccaggccaggaagacggcgggcggcgacatgccttccgcaatctgtccggcttccaccagcgttttctggctgggcggaagggaattgaaaagggctgggtttttctggatgcgggatgccggggtggacacgcaggaagcaaggctcagagcggcggccagggtagtgaaaagtaacttccagttcatgatgtacatacggataacactcactttgactcttgccaagggtgttttgttgagtaaaatgtacgaacacgttatgaaagcgctccgcaatctggctttaacactgatggtccccgttctggtttcttccctgtccgcagcagaaaagccggaaataatcgatgaatatctcccggtcggcaaaatggcggaagcttccgccgtcagcgttgtgcttgatgaaagccttcagccattcatggaaaagattgacggcgtttttgcctccctgcccgacaaggacaagaaggaactcgtcagccagatcgttcccggtcagcccgttccgtatgacgaacgtctgggctggaccaaggatgagtatgccaagtatctggaatgctggaagctgaagcaggtgcaggaagtggcccccgtagctgtgggcattttcgcctccggggaacgcggcatctggactctggccgcggtggcccagcagggaccgctgccgatgagcaccctgaagtatgactccaataccaaatcctggatttcccccaacggcgccctggccctgaaaggggacgtttcctatgacgatctgaacgtgtacggcgcatggagcggcaaggaatggaccatggaaaagaagaccattctttccaccctgacggagaccattatcgcgggcaagaccaaggacggcaaatatacctatttcgtttacaacatgtccgagaagaatccggataatattgccattgccaaccagtccatcgtgctgcgcatccccatcacccgcattacgggagaccccctgctggaaaaggccaaggccaaggcgcgccagtagggacaacaagacgttcctttcattccggtaaaaacatgcgtatcatcagcggaaaggccggcggcatagcactgtctgttcccaaaggggaagtgcggcccacgaccgaccgggtcagggaggcccttttttccatcctgaacccgctgattgaccatgccgacgtgctggatttgttcaccggctccggagccttcggcctggaagccctcagccgcggggcagggagctcccgcatggtggatttttcccggctttcctgcgcgacggccaaggccaatcttgccaaaaccggcctggagggcggcgccgtcatccagggagacgccgtgcagtttgtgaaaagggagctgctggccggcaggaagtacgacattgtttttgcagatcccccctactgcaagggcccggcggaccgggattttattgtggaactggcggaggccggaattgccggactgctgaaggacggcggcgtgtttattgcggaagtgcaggaaggctggggaaccggcatggaaggcgccgcggagtttgacggcctggacctggtggatacccgccggtacgggaaaaatatgctgttgttctatcgattgcctgagaagtaagatgaaagccttcctgttctctttctgttacaatgtcctgtacaccctcgggtggctggtgacgctgccttcctacctgctcaagcagaagaggcgcggcggcttcggcacggggttgatggagcgcttcggcctgtaccgggtttcctacaaccgggagccgaagggggtgctgtacgtgcatgccgtgagtgtgggtgaagtggtgctggccctcaaatttctccgagcgtggctccgggagcgcggcggttccgcggtgctggccaccagcacggctacggggcatgatacggcggtgaatgcccaggtgtccggcgtgcgcgtaatttatgccccctttgacctgctgggcctgccggggaggtgctttgaccgttttgaaccggaagccattgtgctggtagaggcggaattatggccgaactttgcccgcgccgccaaggtgcggggcattcccatggcgatgatcaatgcccgcatgtccgccaggtccgagagccgctaccgcgcttttaaatgggtgtcacgatattatttttccacgctggacgccatgggcgtgcaggacaagggagacgtccggaggtttgaatccgtgggggtgcgcccctccatcattcatgtgacgggcagcatcaagtttgaccagcagatggcggagcgcaaggaaaccaatgcggagtttgccgccattctggacaagctgaagcgcggcaagcccgtggtgctggccgccagcacgcatgacggggaggaagtgctgattgcggaggccgtgcgcaaggcgggaggcttccccttgatagttccccggcatgcggaacgccgccatacggtggtgcgtgagttggaggcccgcggctggcagtgcgtgctgcggacggatggcgagcttccggaaaccctgaaggacaatgtctgctacattgcggatacgaccggagaattgagggattggaccgcgctggcggatgtggccgtgatcggcaagagctttctggcggacggcggccagaatccggcggaggccgttgcctgcggcgtgcccgtgctgacggggccgcacatggagaatttcgatgcgctggtccagctgcttgagggcgtggacggcattacccggtgcgatgaggagcgtctggcggacgtgctcaaggagatgctggacaatccgctgctggcccatgcccagtcctcccgcgcgcaggtggcgttgaaagcccatttcggcgctacggcccgcaccatccgcatgatctgcatcatgctcaagattcccgtttaacggcgggagccttttgtccgcgggcctccggcttggaatggagcggcagggcgaagacttccccctgcggcgcgtcaatgatgatgtcaaagtgctggagggtgtccacgcctatctggcatctgccgcctgttcccgtcacggcgaaggaaaggccgtccatctggaagtccggccccatgcggagggtggagggtatgcccagcttcatgacgttgcggtccccgctgtgtccgttgatgtcggaggccttggccgtgagctggtttccatttgggtccgcgggccactgttccagcggggccagggaaagggaagaaccggaatcaagggccagcaggaaggcgtctcctccccgggagcagcggacatagaaaattccggatgggtggcgttccacttccagcggcttcatgttctgggagggaaagcgggagcgttccagaaattggagggaagcatccctgacggacagcaggaacggggagaagcccaggtagttgattcccagaatgccgtccaccctgacctgcatatctttttgaaggggggtgaggtccatggcgaggccgaagaagtttttaatgtgaagccctccgatggagaaggtcttcatggcgaaaagctggggaacggtgttgacgttggagccgggggcgatctgcgcgttttcaagcggcaggccggggaaattcttcttgatgaatttgatgtcaaacgtggtgtgggaggccgccgtgtccacaatgagattgcatggaacgccgttaatggtgcattgcgccacaagaagtttgctgtgggcgtctctcgtcagccggacggggttcaggtccgtgatggaaacgacgggcctggcctgggcggggtccggctgttccgctgcggagagaggaagcgcgcccaatgccagaagggccgcggaagcgcggaaaaggctgcatgggaagagcatcccttactggtaagcgcgcctctgcggtttgacaagccaatttgacggagaatcagtcatggctgcggtggttgggcttgtggcggcgttccagttccacgcggtcctcataattccgggcctgtaccttccggtctctcttcccggcccgttccacgttcatttgcctttttttctgacgtttggcaagccgggcgatttcattttccaaattcaggaaattcaagtaccgctccctgtccaacgttccttcctccacggctttcctgatggcgcagccggaatccgtgccgtggctgcaatccgcaaatttgcattcctgggccagctccgtcaaatccgcaaagctttcccgcagggtatgttcatccgtccacatctggatttcacggattccgggattgtcaatcagcaggccgccgtgtttgaggagcaccagttcgcgcgccacggtcgtatggcgtcccttgccggtcacctcattcacttcccccgtccagagccattcgtcccccagcagggtattgaccagcgtggattttcccactccggaggaaccgacgatgcagatggtttttcccctggaaaggcatttgcggaattccttgattcccttgttgtgcagggcgctgatgccgatgatggagcattccggggagagttcccgcagggcctgcacggcttcgtccacttcctccctggagaaaaggtccgttttattgagcaggatgagaggtgcggcgccgctgcggcggatgagcgtaaagtagcgctccatgcgcctggggttgaagtccgttcccggctccgtcaccacggctacggtgtccacattggttcccagaacctgttccgcgctgctttttcccggagctttgcgggaaaaacaggtctggcgggggagaatggcgcgtatgacggcttcgtctcccgcttcccccgggtcaatcgccacccagtctcctacggcgggcagttccgcatccgtggcggcgtcatgccagagcttgccgctgacgaccgcgtccacgtcttccccgccgtccagcagggcggtgaagttgattttcgtttcccggatgaggcgtcccggaacccagccgggtttggcgacggcgttgaaagcgcgttgaaagtggtcgttccagcctaaatcctgaagagtgacgggcatgaaaatggaaaatgtagttttgggaaaggccgccggcatttacatgccgacatcggatcgtggggcaaaccttcttccggttcaagcgtggaacgggtctgccgtgcgccatgacggagcttttccctgtgcgagacggcatgcgcgctcaatgatttgaaaggcaatttgcgttttaggcgctttttccaaaagctccgtccggtccgggtaaacgagcagcacttcattttcagaggagttaaaaccaatgtcactgcgggaaacgtcgttggccacaatcatgtcgcaccgcttgcgttccagtttgccgcgcgcgtaattttccacgtcatgggtttccgccgcgaagcctaccagaatgcctctgaagccgaattccgcgcgcatggagccaagaatatccgcagtacgttccagttccaaaatcatgcgctcccccgttttcttgattttgcggtccggaacggaaacggggcgataatccgctacggcggcgctgaggatggcggcgtcggcgtagggagcctggtttttgacagcatcatacatttcccgtgcacattcaaccggcaggaagtccacgccgtgcgggatgtccagggaagtggggccggagatgagaaggacgctgtggccttcgtgaacagccgcttccgccaggcaataccccatttttccggaggagtggttggtgaggtatctgacggggtcaatagcttctctggtggggcctgccgtgataagaaaacgcatgagaggcattatgcggaatcacgggtaaaagtgaagagtgatcttgtgcagctgcgcattatgttccggcttgactccttcccgcgattgggggagttatgaaggcgtgatttattgggataataacgctaccacaccgctggccccggaggtttacgaggccatggagccgtttttaaaagaacggtttttcaacccgtccgccggttacggctgcgccaggagcgtgcgcgaggcggtggaggaagcccgtgcggccgttgccgccctgttgggcgcatttccttcggaaattgtatttacttccggcggaacggaggcgtctaatatggctttccgccagatggccggggagcgggagggagggataggcgttttgtccacggaccatgacgcctccttgaagacggccctggccctgggcagcggctgtgtctgccccgtggacagggaagggcgagcggttccggaaaaatgggagtccatgtgcgcagggggcgtgtccggcgtttcttttgcctgggccaataatgagacaggcgcattgcaggatgcggcggttttgtgttcctccgccgggaaacatggagttcccgtgcatttggatatagtgcagtgcgccggaaaaattcccgtggatttgcatggaatggaagtggattatgcttccgtatccgcacacaaatcccatggccccaaagggattggatgtctgtacaggagagcgggggctcctttttcccctttgctgttcgggggggggcaggagtacggtttgaggtccggcacggagaatgttccgggaatcattggttttggtgcggcggcgcgggcggcattgaggcacttggaggaggacgccggacggctgtcccggatgcgggattcttttgagtctctcctgcgggcacaggtgggcggcgtgacggtgcattccggcggaacggaacgtattcccaatacttccaatctggcgtttgacggatgtacggcggaagcgctgatgctgttgctggaacctgccggcctgctgtgttcggctgggtctgcctgccatacgctgcagccgatgccttcccacgtgctgacggccatgggattgtctgatgaggcggtacgttcctccctgcgtttttccctgtctttcatgacgacgcaggaggaggtggaacaggctgccgccctggtgggctccgccgttcggaaggtgcgcggcgttcagtcttcgcgtaccggcccggtgctcgtgtacaggccagaatggaagggctgagaggctggggcgcttttacagaaagccgtttgtgttccatgacaccggagctcagtaacagcggctccctccctatcaatgcttttacagatgtttatgaggcgattctattgcggcagaaatatattgcagattttttgctcattcgcgaatcgacttaaaatttaaacgtgacgcccatattgacgttgtggcgcactttgtccgaaacgtccgcggcatagtcggcatagacgctccactgttccgtgatgctgtatccgatgcctgcgccgaatacgccagcgtccctgtccattttccagccccttacccttatgaaggaagagccgagcatggcatttacttcgtagcggtcgtcgcaaaattcgtgcgtgtagaacattctgcccgtaaagtagaagccgtttgaaaacgcgtaagtgccctcaattcccacaagcgacttcacgcttgtatagttttctgattccgcgctcatgcgttcttccccgcttttttccgtgaacgacgggttcatcaggaagtccgcgtttacgccgattgtgggtttcaggtaaaatccggtgtcggcaaaaggcttccacgcgtatcgaacgcccgtgaagacaccgatgaggtttgaattccaatcggctttgcttttgttcaggatgttcatcctttcggctttgttcatgccgaaagcataggttgcaccgaagtaccagtcaaagttgccgaagaaccgccagtcggtgtaggcgttgaccgcaaggctttgggtttccgccttgccgcagttgcccttgcctgacgattttgcctgaaaaccgccgaagccgaagcccgcaagaaacgtgttacccgccgtgtattcaaaattcaccaagccgcccgaaatatagtcgctcgacccatccatgttttcatcgccgccgtaggtggcaaacctgtttatgttgcggacggtaatgcctgaaaaacgcccccccgaaacttccgtgccgctgctttttgcgccgaggccgtcgattgccgcgctcgtgcggttgagcgtgtcgaggtggattatgtcggcaagatccatgttcatgcgcacgctgtgcactaccgactgcggaagtatcgcacccagtgtgccgctttttaccattgcggcgaaattacgttttttggtaactgccgcctcgttcgccgcgtcgtcgccgtcgatgtattcaagatcgtcgtaggtttttgccaacgccttttcgaattcgtttgtcgcaactgcttcggcaagataggtgttcttcttgatttcgtagccgacattgctgccgacgttgacgtacttcacggtgatgtaggtgttttcaaaaggatccaagtcgccgtcgatcatgcccgaaatgttgttcgagacgacgtcgtgcgtgcctttcaaggcggttgcggcggtgaggcttcccgaagagtcgtcggttgcggagaaaccgaagatgttgtcgtagtggttgttgatggtgccgcgcaagcccgcgcccccgagtgtccccgcgctgattacggtcgcggctgaagagtttatgccgaagacactgtttatcgtaagtctgttcccgcccgccgaaactgaacccgtgagtgttgccgaaccttcgtttgacagtatgaggtctgtcgtcgaaacgatgtcgccgctcacagttttgccgtcaagcacattgacattcgtaccgcttacgcggatgttgccgacatcgccgacgttcagtccgttagtgacatttgttgctgagatgtcgccaacggcgttgtttaccgtcgccgaattaaccgagttgaacgagacgttgccgtttgcgttttcgattgtcaccaaaacggcgtttgaaatgtttgctgatgtctcgactgtgttgactttaatataccccgaatcctcgcccgacgtaccgatttcgagcgaacccactgatgcggtaatgttcaggccggcaaccgagtcgaatttcattttgcctgaaaccgtgccgattgttgattctgcggcaagatgtttaccctcgatattgccgttgacgactacattgcctccgttgtttagctccatgccggcgtccgccatgaggtcgccatttatcgtcgcgctgccgtcgaatgtcagatagaggtttttcgagcggattgcctgggcgctggagttttcgtttgcagcgattgccgagatttccgaaccatcgagcatttttaagaaaaggtcgttttccgtccaaattccgtaggcgttggagttttcgcttgaggataggattttgccgccgagggtgatgtcagcgttgtcggcgaaaataccgtttgccaatccgttttcagacgaaaccgtaatgttgcctatgatgttttcattttggcccgattttgtaatggagtttgcaaagatacccgtggcatctgcgccgcctgaaacctccaaattatctatcctgatgttttcgaggtttccggctgtggaaacagggttatctctgcctggcgcggcgattatgcctgctgcgttgccgctgattcccgcgcttacttgcatatcggatatggtgaggttgcggccgccttccgtcagatggataccggttgcattggtgtacccctttactgtgattgcatttgctgtcaaatcgcgcttgacgctttttgcgtatatacccgttgcttcaccctgcgtgctgcccgaagtgattgtgctttcgatgtcgagttcgcccacggaaagcgagtagatgtcgcccgcagcagaggggtccttggccgcgtttttaccaacttttacaccgaaggcgtcttttgctgtcacgtaaatttggcccgaatagttatttttgagcgaaacgtcgtcgctgccgagctggttggccagtatacctatccccgtgccttgttttgcattgattgtaagtgaacccgaaatcgtcatcgcctgcccgtcagaactgctcgacgtgttcacacccacgatgtaggagtcgtcgtcgattgtttttgcggaattcccgtccacagtgtaaattcccgaaatttcgaggtctgtaatttgaccgctggtcttgatgagtccgaaatctttattagtctcgatagaggaaacgttcccgaagctataatatccacttccgcccagaacgcctgaagaacctgtggttgtcttgttgtcccacaaatacgagcttgcacttacagtgccgtttgtgcatcttatgttgccttggttttcgattctgattgtgttggtgagccggttcccgtatagttcaagactggattgggaatccaaaataaggattaaccccgtgccgcctttatcaaagtcccccgatgcgcccaaacgcgaattttctaatttcagcgtcgtgttgtttccctcagaagtcggctccacatatttaatgcggatcgaatcgggagatgtccaaacgtcttttaagataatttcttttgtgtctccgaatatttccgaagtcccagggactgtgctcccgggggttattggtccttccagagtaatgcggtcggcaaccgtattgcccttgcctgttatcacaagcgtttcagaggaggaatcgtagttgtatgtttgggcgcaggcaataccagctgtcgccaacagggaagcagcaatcttttccatgtttattgcagaaaatctatggtgtttttcgtttatttatacaattctgaaacaagcctacctttactcatttccaaatactaaataagcgatttttcttttcagataaattcaggggatggtcaagtataaactgttatcagctcaaaaatggtgtgaccggccataaatcacggtaagggtgcatccctaagtaatcgtaagggtcatggatgtgcagggacggcggccgtgttgtcgggtttgcctgcctggtgggggaaggggaagaagccgctctgtttgtggcgccggagcgtcagtgcgagggaataggcacggctctgctggactgggtgaaggagcacagcaaggggatgctgacggtgggcgtttacgaggagaacgcccgtgcccgcgcgttctacaggcgtggaggatttgaggagatcggctccagggatgacgagctgacaggaagccgggagtactggacggaatggaaaggagagagtatatgatcatcataaaaaaggcggaagttccgaagaacttccgccccctgtaaagcaggccggcgtcaggcgagctccaccttgacgccgctcttttcaatctggtcagccatttcaggagaaagggcttcatcagtgatgagcatggagatctgtgagggcgcaacggtatagaatgccgggttgttcgctacgctggtggaaggcatggcgatgatcaccttggcatccgggggaatgacgctcttgatgaattcggattgaagcatgttcttgtatccggcgccatgcttgggggagtagcagtccggcgtcagtacaaccatgtcaatgctcagggaacctgcggccttggcggcttcctgtcccacatagaccagggcttcgcggtcgaagcgtccgcccgtgcagtagaagctcaggttcggaatgccttcaagccgggtcagcagcgtggggttgttggaaaccacgtgcgtatccctggaattaatgtggttgcagatctggtagcccatggtgctgctgtcaatgaacatgaccacggaagcggggatgttctggacggctttttttgcaatccttatggaaacatcgtcttgagtgacaatgtcttcatggagggatttatgggtaagggccagagcgccgccgtggacgcgcttgagaaagccgcgtttctcaaggttaatcaaatcattacggaccgtttcatccgtgaccttcatctgtttggccagagcaatggttcttgcggctccatgttcggccagcgttttcagaatgaactctttacgttgggatgctaaatacattgggttctgtttttctatatagaatgtttacacgttctaggtgttaagttgttttctaacaatttttcactgtcccagtcaagcgttagaaattctaagttttgattgttattgtgaataatgcagattttgtaataatgggacaattgaataccgagaaatgtacaaaaataattttatgatgcacaaactagttatcggtatgacagagtttatcaatctggaatgataatggacgccggatcgaagttgggagtggggaacgtgagctggagatggcgcagtttttccaccatcaggcgggcgacgacgaggttcctgtaccatttccggtctgccggaatgatgtaccagggagcatccggagtggacgttttttcaatgagatcctgataggccgtctggaattcgtcccagcggttccggtcatccaggtcgtccatgcagaacttccaaagtttgtccggatcctggagcctggattccagccgtcttttctgttccgccttggaaatattcaggaacagcttgatgatgacggtgccttcttccgcaagcatggattcaaaatccagaacgtgcttgtaacgtcgcttccagacggggtccgggaagatttttttcacgcggacggcgatgatgtcctcgtaatgggaacggttgaagatggcgatctgccccttggcgggcacttccttgtgtacgcgccacaggaagtcgtggtccagttcttcaatagtaggttttttaaagggaaccacgtgcagcccctgcgggtccacccgggaaaagacgtgcttgacgcatccgtccttgccgcctgcgtccatggcctgcagaatgacgagaaccctgtgcttgtgctgggcgaagagttttttctgcagttcctgcagttcttccctcagcttgtcgaattcaaccagggattcttccttggttccggagaagagagatttgtcatccggagagtaatcctttaaacgcagttttttgcccggaggcaccaggtaacggttcattgtatgcgaagttaacgttgaagaagcgggagaggaggtggaagaggttttcatggcggcgggtttggccggaaaatccggcccgaagaattgctgaagggcgtccttgatgactttccttttgaatttggggaacatctccagcttgaggtcctggaggggtatccatttcgtttttgagaattcagggctgcggtgcaggtccgtcttggggcgcctggccttgcagcgcaccaggaagtaggtttgctcctggcctatccagcgcgtgactttgcggttgccggaggggtatttgtaccgcaggccggggaggcggctgacaatggtgtattccgtgggacgcaggcccacttcctcccatacctcccgcgcgagcgcccgttcaatgctttcatttttaatgacgcccccctgcgggaagtgccagtacgggttgcggccgttgtccttgcccagcagcacgtagccgtcggcgtccatgatgacggctgctgcgttgagtctccagtttttggctgtagatggagtgtccatgacgggagggggcggcttaactggcggtttgagccggcgtttccggctttccggtttccggagcggcattttccggttcatcctgccagatgaagtgttccagctggatgcggcgcgcgtaggccgccgcttccctggctctgggaccggaggtctgcgccagttttttagccagagccagggcgccgtcccagtcctggagctggcccagcaggcggatggaggcgaaaccggcattgtagaaccagtgccagtcccggcgcttgttggcggaactgccgctgggcgtatgggccaggatggaggcgtagtcatccagcgcctttttctggtcgttcatccgttcgtagaattgggcccgctgggtgagggccttgaatttccaggccaggcccaggttgggggtgtccagaatttccgtgcacaggttgatggccttgcggagggtgtccgaatgggtgtcttccttcgtcacccaggcgtccgcctggatggagagggccagcaggcgcatgtagcgcggaaggggggaggaaagcaggttttccagagcggcgatgcattggtccgcttctcccatgcgcagcaggacggaggcttcttctatcctggcgggctgcgcaaagggggtgtcccccgcgcccagggttttgaagatgttcagggcggctttcagcgtattgccggtgttgctttgctgggcggcttttccggccaggaagagggccgccgcctggagggggctgccagggtatttggaggggaagggctggaggacaagctgcgcttcatggaaatccccgttcttgtacaggagttcccccagcttgagatagagcatgtccgcctgtttgccttccgaatccagggcgatggcctggcggcaggcttggatggcgctgggccattcctgccggctttccgcctccaggatgttcagccgcgcaagctgcatggtctgttccggagtcagctgttctttttccagcggcggaagaatggcctgcacggtttcaaggtccggcgggttgaggttcagggccacttccgcctggtccagccgggcctgggttttcagggccgggtctgtcgccagtgccacgaaggacgccagcagttcgggagcctgggggttcattcttttggcggcgtaatgggcctgttcaaagaggatgtgttcccggagctgggcagagccggcggcttccttgaccagggcggcggctccagcggcgtcattggcgttcagcgcagccagattttcattgaacagggcgctttccgccgttttttcagaggcgcgccgggctgcttcccggaagaggctctgcgccagagggtagtctcccttgcggaaggccagggctccctgctggaagacgaggccgggggacgttccgggatatttggagataaggcgttccgcgtcttccacgcggtttttgtccagcagagtggtgatggtattcagggaaagggtctggacgggaaggctctgaggatatttggagaggccgtcctccgccattttgacagctcccgccaggtcgtcctttgccagaagcaggcttcccatggcatacatggctgccggctggcggcccgcatccctggcattcacccagccggtgagtttttccagcgcctggggattggtgcggaagatgtcctcctccagcaggatgttgaaggcgtccatcagcagggaggattccgatttgccgccaatgaacgccagcaggcgttcttccgccgttccggcagtgtgtggggcttcctcttcctgaggctgggcgcgcgtttcctcttccgcctgttccgggttgtttttctcccggacgatttccgccctggcgagggccagacggcccagatcccggattttccccggataggccttgttgtccatgacggcggcgaagatttttatggcctggtccaggttcccctgtttgtcggccagtttgccttccacgagttcggcataagagcgcatgggcaggtccctggccgtgccgtcgtccattcccgtcttgaattgttcaagaatggcggcggcctccgcatagcgccccaggttcaccagaacgtccgccagaaggacgtgcgcggtccgggagatggcgggggattccgcctgccccagcctggtgagggcgtccagtaaaagctgccggtcctgaagctggcgcgcgagctgggctttcagctggaagccgtagagggagagcgggtccgtttcaggaatggaggagagtttttccagggccctggtaaaggagcctttgttaaagagaccagccgccatccagtatgatttcatggaggagtccggaagttgttcccaggcagtcagtccttcttccgtttttctggcgcggatcagggcttccgccaggaaggggcggatgatggctttctgggattccggaagatttttggagttcaggcattcctgaaaatgcttgctggcttccaggggcaggcggtcttccagggctttcagaccctgctggtattttttatttttcaggagggcctgcctgtcctgcgagaggggagcctccggaggaggtgttgccgcggctgcagggggagtgccccccatggtgagcaggaaagccgcgcaggacgtaagaacggcaagggaaaaacggggactgaagaaggtgtgcatcatcgtaggattatgattcaggccccatgaagatgagccggatgtagcgtttgccggaggcggtcagcttcggatccttgctggagccggaaacgcggttgcaggtcctgtacagttgggagaagggatggggaacagcccggatgacggagggttccgtgcagggctggtcggagggagtcacggaaacgggaactcccgttcccgtaaagctgatttcccaggacttgggattggccggtcccggtttcagcaggaaggggtagcgtttgacaagattgggcaggcttccggtagatggagcgcgtacgacgtactgaacgggcagggaggagatatggcgggagagggagaatcccgcgccgtccttgcactgcatgagggcgggggccgggtcaaaaccggccaggttcaggccgttgtaggcgccatggcggttgggggtacccagtttcaggctggaataccagttttcaaagtcgtcctggagcttgaggcaaagttccagatgcacatgggcgcgtgttttgttcaggcccactccggagtagcccagttttccgatgacgtttccggtgcctacccggtccccctccttgcaggagacggaagccagatgggcgtacaggctgtaaagcgggccgtccgccaattggtgttcgatcaccacatagcggccgtagttgctgtgggtggggttggcggaagcgtggaccacggtgcctccggctacgggatgcacgtcgtccagcggaatgccggaggcgtcgcgcctgaggggcttgatatcgatgccttcatggaatttgacggctacggggcctgcctgggttctgacgagggtccgggtaaagccgtaggctcccgcctcccagggctgggatttcttcccttcaaagttccggtccacgtacatgtagaagtcctgcggacggttgtccagcagggccgtgttttccgtggggaagcgcacgacaatatccgccatcaggaatggcatgctccagaagaacaagaggatgccgatcagggaagggaagaacttgccgtgcatgctcatacaaggggtgctggatcagatccgcccccggcgggtgctgaccacggtgcggtccttatgttcttcgggctccttggcttccttcttttcctgggtggggtccttgatgggaagaaggggcttggtgacggcggccagcttgttgatgggctcttccctcttggggtccgccggaggaatgaattccgccatggcggcaaggtccgccggggagaagccgcccatgacggccagtttgccggaggtaacgggtttgttgtaaaggcgcagaggctgcatggcatgaccgttgacgaccggcagtatctgcttgccgaggttggcggcggttactccttccacccggctgtccaggccttttctgacattgactacaatgccgtaggtattgtcctctgccgggaaggagtagtaggattcaatgtccttctgggaaatgaagggagccttgctgtagtaatgcccgtcccgctcaaaggcgaattttttgctgtccgtcgctcctgtctccatgtggaagctgacgggatacttgtccgggccgcaggagcagagcatgagggagccaaggaagaacaggagcattttcataatgtccatgataaaagatttagttctccctgggcaaaccaataaacaggcatggagtaattttatgccgccgttacggcaggagggagagcgttttttgaacaatcaggtccactggcatcagttttcccgctccttccgctccgcaggccagcacgccggattcacagggccccagaatgcagtggccctttctttgtttcaggacggccgcattttgctgcgtggccgtgtgttcccacatgtggacgttcatggccggacagatgagcaccggggcctggcaggccagatagagggagctgagcatgtccggggcgaagccgtgggcgaagttggccatggtgttggccgtggcgggggccacgagcagaagatccgcccgctgggccagttggatgtgcgggggaacccagtccgccttttcatcctcaaaggaggagaagacgggattgcgggagatcgtgtgcagggtgagggctgtaacgaatcccagggccttggccgtgcagacgcagtgcacctcatgcccgcttttgacgagggcggaagcgatgtccgccgccttgtacgcggcaatggagccggtgatgcccagaatgatgcaggccatgggtggggaggggtcaggctttggaggcttttttgccttcgtcaatgagtttccagaagtgtttggactggctcaggatttcatcttcccctgcggtcggggagatgttggtgcggaacagaaagtcgttcaggctgttggcgtgcagaacgcggtggacgaccactttgccttcaatgacttcaaagtagatgcggtagtccctggctacgtagcggtaaagaattttgccatccttttccatcttgccgaagcgggcgtcatcaagggtttggagggtggattcagagacctggaagtccccgagcaggtccagttgttccagggtggggatgctggatacttccgcagcgctgattttattgaagacgatttgaagcacgcccttttttaagtgcgccggcgggttagttcaagcctgaaacaaggcacgggccgattttgagaaggaccgttccgaaccccggcattcccttgggagccggggttccggattaacgggagtcctgcgtggggatgatgcccctgctttttaccacctgggtgccgcgaatgacttcaacggtcagaggcttttcccccgtgaggtaataggtggcatccagcatgtccccgtagttgttaatggtcgtgccgttgatgctgatgaggatgtctcctgtctggatgcctccccgcgcgagagggcctccgttaatgaggccttcaatgacgggagtggaggcgttgatatccagcaggcatcccaggcgcaccctcttggcttccggatgggttgccaggaaggagatggcctgggcggggagcaggtggcaggttcccttgcgggaaactcccagcacgatgccgaccagacggttttcagcgtcatagcacggctggccgatgggcggcgcagccagtttggggaattgggcgcggacaagacgcagcgggaagctggtgtctcctatggagtgctccatgcccacgtaaattcccagggtggtttcattccggctgctggcaaaggccagcttgtcgccgcgcttgagaaggccggagggcgtcacaaccgcctgcccgtcgtgtatgcgggcagcatccaccttgaaaatcgtcaggcccgtgagcttttcctgggcccatacctgaaggggaggggtgtccttgtccccaaggtagtaggtcacaccgccgtttttaaagacccggtagggaatcagggaggcgagcatgtcttttccgacctgcgccgccatggccgtgtacggctctccttccgcctggtggggaatggcttctaccttaaaaggggcaggcacggccgccgcttgataaatcaagcctgcaacggctatgcccgccaatatcggagccaggttcatcatggattgttacatctcgatgagaactcgggataccggttttttatcggtattggaatcagttttcagctgattgtcgttggccgatgtttcatatgaaggcgctcccgtggtgaattcgggtttttccgcaggggcgacttcggttaagggttgttcaatagtttccttacttacgggaaccgctttttccttcaggagaatctcttccttatccttggtggaggatgcgtaagagtcggaaggatcatccatgttcccggatgcgataataacgcctaccgcagccaatgtcacgatggacatggaagcatagacccactgccagccacgaaagttctgcagatagttgtccaggcgttcgagtaacaatttccaagcagagtgggtagccggatcggtttcctttctaagatgaaaattgcggaggaaatcttcttcaaagttgtcatggtaacaagcttccttacggaaagatgccagcatggcaaccagagtttcctcgttatgttctgtggattgtttatccatcgtcgttgatgttaagtgtaataaaggttagggtgttttagtcccgaatctgggactatgcgtttgacagggcggagggaaccgatgttcaatattttttccaccgttaactcagatattccgccagcaggccttgcagctccttgtgggcataatgcagacgtgatctgagcgttccttcagagatgcccagaagggcggatatttccgtgtggttgagtccttttacatcatgaagcacaacgacttccctgtgcttggtggatagttttttcaatgcttcattaatcttgagctgaagttcgttcagatgggtgcgtcgttccgggtccgctccgtccgtttcgtcagccatgttcatgtccttttccgtatggtcgccgtactcgtcgtcgtccaggctgtaggtcatcctgcggttgcgttttttcaggaagtttctggcatggttgacggcaatggagtgcagccatgtataaaaggcgctttgtccgttgaagtagcgcaaggcccggtaggctttggagaacgcttcctgggcgatgtcataggcatcgtcgtagttgtccgtcatctggtacagggtggcatggagcttgcggctgtggcgaatgacaagttcgtcaaaagctcgcgaatctccctcccgcgccctggcgaccagttcagtgtcttccaaggtcgtatatgcaatgggtcccgacatattagcagcagaatacccaaaaatagggacccgctacaagggcaaatcgtatgcacgcccccctttaccctcaaaccagcgcatgtatgccacattaactgtggtatatccgcccggagtcgggtagtctccggtgaaataccagtcgccgcaggggccttctatggattcatgcaggttttcgatggtctggaagatgacttccacggggcacggggcgtcgtgcggagtgaccaggcgggtgatttcacgggagatttcagcgtccgtcaagccttcgtaaatggccttgacgcagttgcgccgttcttctctgggcttggtcagttcctccttgcatgccttgtatacttcttccagcaaccgggcctgcccgtgctgcttgatcagggagactgccgcctggaaggcgatgaagttccccagttcggacatgtcaatgccgtagcagtccggataccggatttgcggagcggtggaggcgacgacgattttccgcggattggtgcggcccaggatgcggaggatggaccttctcagcgtggtgccgcggacgatggagtcgtcaatggcgacgagcacgtcttccggtcccacggccccgtaggtgaggtcatatacatgggagacaagctgcgcgcggctcttttcctgcgtgatgaaggtgcgcatcttgatgtccttgtgggcgattttttcaccgcgcggccatcgtttcaggatggcgctgtccagcatgttttcatccagggtcccgtttctcagggcttccagtagctgggcgtgcacgcgcttgcggcggtagacgcgcaggccttccagcaggccgtagtaggcggtttccgccgtgttgggaatgtaggtgatggcggatttgtcaaagcggtcttccagggagtccacgatctgcggggtcagcgccgcgcccagggccttgcgttcccggtacacgatggggtcgttcccgcgggagaagtatatcttttcaaaggaacacggcgtgggtttcaggggcgtggtgaattccgtgatgacgtgcgtgccgtccgccttgatggaaagcatgttggccggcggcagttcctgcacctgttcgctttccacttcaaagacggtcatcagcgggacgcgttcagaggccacggcaatgaattcatccgtaatcaggtagtggcaggggcggatgccgtgcgggtcccgcaggcagaagtagtccccgttgccgatggcgcccatgatggcgtagccgccgtcccactgcctggcggagttgtgaatgatttcctggatgttgagccgggaggagatggcatgggggatttccgggccgggcatgccgctgtcccgcagggcgcggtaaaggtccgtatgggcttcatccagatggtagccgatttcttcaaggacggtctgcgtgtccgtgccgaagacgggatgctggccgcgctcaatcatgcgctggttcagttccggcgtgttggtcatgttgaagttgcccagcaccatcagggtgcgcgtcggccagttggtgcggcgcaggtagggatggcaggagccttcgtcaaagaggccggaggtgccgtagcggaggtgccccatcaggatttccccgccgtagtcaaagttgtttttaatgtcttcagcgtctttcaggttgacctggccgcggcggacttttttgttaagcttcttgatttgcccgttgaagatggtggtgagggcgtccttgctggcgtcccgggtgcggaacaggtagggctggccgaggggcatgttcagtttcacgcagccgatgcccgcgccatcctggccgcggttgtactgcttttccatcaggatgagcagcttgttgaacgcccagagggtggagccgtatttatcctgaaaataagagagaggcttaagcagacgaatggcggctacgccgcactcgtgtttaagaaaatcgctcatgggattgtgatgaaaagattgtcctgtaagtgtggtgtatccgctgcaaggagatggtgccttctctattcgccctgtaccttgacatgaatgccgcggccttctctcaacgtgccgatgacggtgccgccggggcctgccttcagcgcggcttccacgtcctccggcttcacgatggctacccagccgatgcccatgttaaaggtgttgaagcggtcctgcgggtccacatgcttcaggattttctgggctgcggtgttgtcccagcagggaatggtgaggtccgcgccgtagtcgcccaggaagcgttccaggttttccggaaggccgccccccgtgatgtgggcgtatgccttcgggatgacattgaagcggcgcatgtccgccaccacgtcatggtacaggcgggtgggctgcagcagggaacggagttcctcttcatcaaccacgtccgggttttcctccagaatgcggcggataaggctccagccgttggcatggaagctgtcggatttgtagccgatgaatacgtctccggggcgaacggtcttggggtcgatcagcttgcttttttcacagcatccgatgcagaagccggagagttccacgatggattccggaaccacgccgggcatttccgccgtttctccgccggccaggatgcagttgcaggattccagatagtcgcacatgccggccaccaggcgggtgatgcgggtacgttcctgttccagattggagatgcccaggtagtccaggaaaagaagagggtctccgcccgtggtaaggatgtcgttgacgttcatggccaccaagtccttgccggcggtttccaccatgtccagttcgaaaaggatttccgtcttggtgcctacgccgtcgcatccggtgacgatgaccggttccttgtaggagctcaggtcataagcggcggcaaaaagaccgaaggcctggtgcagggatctctgcttttgcgttcttttaacgtgagagctgatgtcggatacgaaagcggctgcttctttggtatcgacccccgattgcttgtaggttagtttgccggacattgaacggatggactgggtgtgccagcatcctaaaggaaggctcctgccgcggcgagtgaaaaaagaagtatttttgccataggccgcgcaggaggaagcctttttattccacttctatcttgcagtcgcgccagagccaccaggcatccagcgaaaatttgcccggtcccgtgtagaagagggtcaggtaaatcagcagatagatggcggcgagctcctgtgcgccccagccggagaggcccaggacgaggaagagagccacgcacatgttgatgatcaggagaagggaggccaggcgggtgaagagccccaggaagatgaggatggaacatccgaatcccgcgcctacgcacagcagcagggacaggaagttgccgattcccagcgggtcctggaaagccgcccagtttccgctgatgagcattcccagcttggggatgccgtgcacaagcatcatcgcgcctacgcccaggcgcagcaataggacgccgaagtccatgctggtgttggtggagaaagagcccagcaggcagcacgcggatgatttgcatttattctgttccatgcactgtagaccgttcgtgcggcagaaatgctcaaataaaataggatgaaatgaaatatccggaaccaggaggaagcggcctgctgcgcggacgttccgtttgaggagaagccgggcactttccacagtttccggcctgccggcagatactgccgcgcgcgggtggagaaggagataatgtttcttattgaagaggctggcagacagcctcttcaataggtttttcaaggggtgttcaatgcttttttgcgggaatcaggcggaaggcggagggggatttggcggatttgatttccaggggcttggtcgggtccttttgagtttccgcgcctatggtgatgataagcctgtctttggggtggatgacggtggcgttttcaaagacgagcgtattggagccgtccgtcagcttccagccgtccagcaggatgccggagtctccgggattgttgataatcacgttgccggtgccaggttccagcttgggggcgggctgcttgagcttcatgctttttgccagcttggcgaaggtgatttcagcaatgcgccgcgcgcccggctccgtggggtgcaggccgtccacataccattccggatgatcggaaagggggtgcagcgcgtcaaagaggccgaccttgtgcttgcgcgccacggtggcgatcagtttttccgcttccggacggttggccgcggagccgttgtccgagcctgcgtatttgcgcacatccgggtagcagttgccggggaacgcctttttgttgagcgggccgcggtagtccggacccagcaggccccaggcgaagaatctggccttgggattggcggatttccaggcattgaacaggtcgtcataacccttggcgaacagcttggggtcccaccagcggcccgtatcgttgatgcccaggttgcagatgtaaacgtccgccttgaattccagggattgcttgtgttccttggtgctgccgtaccagcggcccacttggcccggatagtcgcccgccgtttttccggggttgccgaatccccggacgtcaaagtccgggcccatcagcgtgccaagcacctgcggataccgggcatctccgggtttgaggccggagccgaaggtgatgctgtcccccacgcaggctactttagtggggacggcctgtgccgcggtgcccagggaaagggccgcggccagggaagcgaagagaagatgaaggttcatggtatggtggagtgagaagggttattttttaggagtgggcgcatccgtgcggaaggggcgggcggggagctggtcgccgttgaccaggttgggggtcacgaagcggttccagcagtaccgtgcgtgtttgggggatttaacctccggggaggtgaggcggatgacagcggtgctgcctttcctgttcgtgatttccgccgtggcgggatggtaagcgccgtccgccccggcaatttcaaactgggccggttccttgccgtccgtcgtggtcaggtctttggcgtgttccagttggatcagaagggcgctgccggagggtttgaaggctttgaaggaggggccttcacagggaacctttttgccgtaaaccttgttgagtgccgtgttccccgcgcgttctcccacgggacgcttgaagggggggtggacatcggcgttggtggaacccaggtcaatggtgttgacgctgtagacctgcgggacggttttggctaccgtgtcctgcatttcccggaattccggccagccggcacggatttttgacggatcgttgatgcgggggagctgaatcatgacgaagggcatttccggattgcggaaggcttttctccaggaggagatcatggttttcagcagcatgccgttctgttcgttgtcaatgatttcagcgtcggattcgccctggtaccagatgacgcccgtgatgggaagggctgtcatccacgcgatgccggattcataaaggaacgccggtttgtaaggatggtccggagacccctggtccagacgcggggagatgttttttctggcgcgtccccttacccagtcggagatgaggggggagtccagccagtggttgccgcgcagggtgcggaagctgctgttggcattgatgacctgccggggaatccacgccgctatttccgagccgcccagggaggaatggatgatgcctaccggaatgccgagcccttcacggagttttttgccgaagtagtagccgacggccgccatcgggcccgaggcggcgggggaactgacggcccactgccccttatagaatttgtccgtagtgacggcatcaaaatccttgtcggaatagggggcgttgttcgtgtgggcctgtgggacgttgttgaacaggcggagctgctcgtccgcggaggcggctatgtcttccttggccgtggaggtctggttcaggcggaacagcatgttggactgcccggaggccagccacacttctcccaccagcacgtcgtccagcttggaagagtctccgttctgggtggccgtcagcgtttgtccctctgcgctgggtttcatggggggcagggtgacgctccattttcccttggaatccgcctttgttttcagggaggagcttccgaaggtgacggtcacttccttgttgggatcagccgtgccggagacgggcacgtttttcccgtggggaaggaccatgtgggaaccgaatacccggtcgaattggggagcggccgcccaagccgcattcagggcgatggcggcagccaggatgcatggagtatggagatgcatgatttaacaggttatttgagaaggagttcgtcccgtgtgaggccggtcagccgtccgagccgtttgatcaggcgcgtcatgatgaagacgagggcgaccaggatgggcaccccgatgatcaggaagccccaccaggtgatgctgccgatggccacgttgtaggccacctgctgttccgcctcaggctggcgcatgacggaggacatgaaggagaggctcaggaagaagttgccgatggaggaggcaaccagcgtgcccgccagaatccaggacgagtttgccagcaggcgctggtaggtctgttcctcgccgttggcggccaccgcctgttctatcctgcgcacgtcaaacagctccggcgtgtaaatgaacatgttgagaaggggggagccggtggagcgggagacgacgaccgccgccgccaggatgaggggaatcagggcctcctttccggcaaacagccagggagtggcgctgtggatgcgcccctccggcccgatgacgaagatgctgatgacgcccgtcagcagcacgccggccatgcctacgccggacatcaggtcaaatttcctggtgacgaccagggaacggattccgtagaccaggggaagggaaagggcgaaaacgagcgcccataccgggccgatgtgccagaagctttcccctgccggacgttccaggggattggcagggcccgcgctgcagtagtccagaatcaataccgggagcaggatgttgatgaaaattcccagcagggaggaacgtgagttgttttgcgttttatccatgaattcggaggcaggtacttgtatcatacgcagatgcgtccccgcaagttgcaaccccgtgtgtgaatgtaaagaccagaagcggggggaggcggttttttcctccgcaggcggccccgcggaaatcgtggcatctgacggcatcttccgttcttttggctggacacaggtgtgaataatgttcagcttctcccgtgactctgacagatcatttttcccccatgactcaaacatcttctttttcgacgcttggcatttcgccggagattctggaagccattgaagtgctcggcttcgatactccttccgccattcaggagcaggcgattcccgctgcgatcggagggtccgatatcgtggggctgtcccatacgggttccggaaagacgcttgcctttgccattccggccctggagtgtattgatcccgaggagcggaatgtccaggtgctggccctttgccccacgcgggaactggccgtccagatttgccgggaggtggacaagctggccctgttcatggacggcgtttccgccgttcccatttatggcggttcctccttccgcccgcaattggacgccctgcggcgcggggtccagttcgtggtgggaacgcccggccgtgtcatggacctgatggagtccggtgcgctgaagctggacaatctccgcatgctgattctggatgaagcggacgagatgctggacatgggctttctggaagatattgaacgtattgcggagttcatgccggaaacgaagcagaccctgtttttctccgccaccatgtctccggaaatcaaccggctggtgaaccggttcatgaaggaccccgtccagatcaccattgagcggcccacgctgacggtgcccaccattgaacagtcttattatgaggtggtattttcttcccggattgaggtgctcagccgcctgctggacacagggaagatcaagatggggctggtttttgccaataccaagaaagtggtggacgacatcgtggacggcctgacggcccggggttatcccgtggaccgcctccacggggacatgccccagatcatgcgggagcgcgtgatggattccttccgcaaggggagcctgcgtctgctggtggctacggatattgccgcccgcggcctggatgtggacgatgtggatgccgtggtgaattttgaactgccgcgtgatccggaggattacgtgcaccgcatcggccgcacggcgcgcgccgggcgcaaggggaaggccatcacttttatggggcgccgtgatttttccctgatgagccgcattgaacgcttcatcggcgtcaagctgactccggaacccgtgctgaccgccgttcaggtggaccagctccggacggaatccctggtggatgatattctggaacgcctcaagccggatgccgttctgccggaggaattgaaggaagtggaagccgctccggaagccatggccgccgccctgtttgatttgctccgggagcgcacgcaccgggaagtacagcccattccggaggacaagcccgcccgcaggacgcgccatgtatcccagcccggagaagaggcggagagcccgcaaaagggagattcctggcagcacaagggggatacggtcacactgttcatgaacggcggcaagatgatcggcctgcggcccaaggacatcgccggattgttttacaatacggtggaaatggagaagggcgccgtgggcgatatccggattttctccaagcattcactgattgaggtggacgcttccgtagctccccagctcctggacgccctggctacggccaccgtctgcgggtatgaggtcaacgtccgcgaggacaagggcacgccggaatattccgacgggccgcgtccgccccgccgcagcggaggtttccgcggcggctaccgcggagaccgggaccggagcgaccgcggcggattcaggggaaaccgcggaggcttccgcagtgaccgcggtgaacgctggggcgaccgcccccgcagggacgacaggaagaagcggttctgacgcttccgcggttccggacacgttacttgcgtcgttccggaaacggttttttccacgggagcggctgctttactggagtttcagttccatgggcacggggtccggattcaggaggatgcctttccggtaggcggtccccgcctcctcggcgccgtttttgtactgcttccacagcctattcagcgtatcccggttgcctgggatgcgcaggaaatcggtgtgggccttgttggcgtgtttgccccatggagccatgcccctggcggatttcagcatttccagtccggcagacagttcctttttttaaatggcgccctgccatgcagatttggaagatctgccgttccggcacgccgtatgcctccggattccaggcgccccccctgtaaacgatgaacagatccttattctctttttcggcttgtgcggcggctttttccaggtcagccattcacacgtccagcccgcagagcgtaccggagggaagcagaagggcggatgcaatcaatagagtatggggcagtttcatagttttttcactataggtctgatacagcaatcatcaattccctttccgtttaattatcttgagagatgggagaattcatgtaagatcgcgctctgttttaacgtttcccctacagtctattttcatctgaatcatgaagctggtatctttcctatccgttcttctgactgccctggttccgtgcatgagcgcttccgggcaggctgcgaagcccgccgcccgggccgtcaagaattcaaaacccaatgttatttttattctggtagacgatatgggctggggcgatctggattccaactggagccagcagaagctgaacgggcggacggtggacaggaagaacgagttcaagaccccggctttgtccgcgctggcccgggaggggattcaactgcgccggcattattccgccgctccggtctgcgctccggcgcgcgcctccctgctgctgggggtgcaccaggggaattcccgcgtggtgaggaacaaccgctttgaccatcccattgaagattcccatacgctgggcaccgtgatgcgtgacgccggttatgataccgccgccatcggcaaatggggcgtgggcggcggcggtgaaagccatggtccggtgacgggcggcccccaccagcgcggcttcaattatttttacggcatcctggaccatctggccgggcatttccattatccttccgaatcccgcgacattttcgagtacaacggttacgcctccaatcccgaatggaagaatatcaaggacaaggttccccagaccgcctattccacggatttgtttgccgcccgcgccaagcaatggattgtggaccagcgcaagtccgcccgcaagaccggcaagccgtttttcctgtacctggcttttccggcccctcacggcaacctggtggttcccggaacgccctatccttccggcggcggtttgaagggcggcctgcagtgggtgaagaagaacggcacggaatccgtaaatacggcttttgacgccaaggcggaaaaagacaaggacacgtacatttatccggacaatgcccgcttcccgaatgaggtggccaaacggcattccacgatgatccgccgcgtggatgatgccgtggcggatttgattcatctgctgaaggatttgaagatcgacaacgatacgatgattgtctttacctccgacaatggcccccacaatgaaggcggcgccgaccccaagcacaggcatggggcgcagaatccgcagtttttcaagagttacggcatgatggacggcatcaagcgcgactgctgggaaggcggaatgcgcgttcccacgctggtacgctggcccgcccgcattcccaagggccagatcagcctccagcccggacagttccatgactggctggctacgctggcggatgccgccggagtgccggttcccgcccgcagcgacggcgtttccctgctgccgacgctgacaggccatgcggaccagcagaagcccggcattatttattccgaatataacgtcggcggcaagacgcccggctacaaggatttcctgggcgaacacaagggagcggaacggggccagcagcagatcgtctttgtggacggcctgaaaggcctgcgcatgggggtgaaggacgcggacaaggatttcatgattttcgataccctgaatgatccgcaggaaagcaaggaccttgcttcctccaagccggagcttcaggcccgcatgaaggccgctgccctgtccaaccggcgtgcctcccttccttccaagacggtgtttgatacggcgctggtcccggcagtggagacaaaaggggctgcctcccccggcttgaagtggtccctctatgaaggggagttcccctgggttccggatttccgtcagctcaagaagcaggctgccgcgcacggcgtggctccgtcgccgtccgtcaagatgaacggtccccggaagcgcggggtggaattgacggggtttgtgaaggtgcccgctgacggggagtatacgttttacctgtccacggacgcgaacaaggggagcaaggcctttgtccgcctgcacggcatggagttgattgacgcggataagacttacgaaccgggagccgaagtttcctccgatttgggcgaccggaagaatcctgtttatttaaaggccgggttgcatcccatccgcatcggctatgtgggcaatgccggtcccgcctccaagctggtcttgaagtgggaaggccccggcttgtccaagcaggagattcccgcgtttgcgttcagccatgatggcggggccgaataagaacctccgatgagcgacctttacgagtaccaggcgattgacggttcctccaagggacccgtctccctggtgcttctgattcaggctcgcaaccatgggcggctgtccaaccgtaccctggtgaggaagcttcccgacgggggctggcagccgctgtcttccttcattccctccatgaccgtcatggatgccgatatggaggaatcagccatgccggagcccgaaaccgggggagagcccgccattcccgcctggacgcggaagaagtattggacgcgcatcattaagggatggtgcagttttgaaggacgtgccagaaaacaggagatgcgcgaggtttattccaccatgggcatcgcgtggctggtcgtggcaggggttccgtccatcatgaaaagcggttttttttccgtgtcccccctgttggagctgctttttcccctggcttatgtggtgcttcccgtgttgtttctccccctggcggctacgatggtgcggcgcctgcatgatgtggggaaaagcggccttttcctgatatggctggccgtgcccgtagtgggctggctgctgttgctgtatttgtgttatggggagagcctgccgggagagaacaagtacggtgatccgccctggagttgaagaatgaagccggaagctggacgcattgaaggagaacaggccgggatggaacgtccggttaagggaatttctgcatgattgcggcattgaaaatgaacaggttttttgttatactggttgttctggttcaaagcgctgcccatggcttctcccagatggaattcaccattggcctttttgatggcggcaggaacagagtggttccggtaaccgtttatcagccggagagggaaagctccgagacaaaggtaatcattttcaatcatggctatgacggaaacaggaacgtcaaatccagccagacatattcctatttgaaccgttttcttgcaggaaaggggtattatgtgatcagcgtacagcatgaattgcctcaggatccgcttctggcaatggaagggaatttgatggaggcccgcatgccgaattgggaaaggggagtggaaaatatcctgtttgccattcaggagttcaggaagctgaaaccgggattggattggggaaagcttattctcatagggcactcaaacggaggggacatggtcatgctttttgcggccaggcatccccttttggtcgataaggccatttccctggatcaccgcaggatgaagatgccgagaatccggaaaccgcggctgtataccttgaggggatgtgattatgaggcggacgagagagtgctgcccggtataaaggagcaggaggagtttcatatgagggtggtgaagctggagggagttacgcatagcggcatgggagggggcggaacggagaaacagcacgagctggtcaatcggtttgtacttgagtttatcaagtgaggtccgggttgcccgttggtggcgcgatgcgcagggaagagattttcctcgaaggagcggtcttgttctgcggaaatagaaagggctgtccccaatgaatggaacagccccttccaggttgaaagttatatttggcgttacgcttccacggctttggagaattcctccaccgtgtcacaggtgcagaccaggttccggtccccgtagacgttgtccacccggcccacgtacggccagaatttatggatgcgcaggccagctaccggataggccgcctcactgcgggagtaggggtgccgccattcgtcggcggagaccatttccgcggtatggggggagtttttcaggacgttgtcttccttgtccgccgtgccgttgatgacggccgtgatttccgcatgaatgcgttccatggcttcgatgaagcggtccagttcctccttgggttccgattccgtgggttccaccatcagggttcccggaacagggaaggacatggtggggccgtggaagccgtagtccatgagccgcttggcgatgtcatccacggtgaggccggcgtcatgggtaagctggcgcggatccaggatgcattcatgggccaccagccccttgttgccggagtagaggaccgggaagagggggccgagttttttagcgatgtagttggcgttcaggatagccatttccgtggcttccttgaggccttccggtcccatcatggacaggtacatccagcagatggcggcaatggaggcgcttccccatgctgcggaggccacagctccttcctcatggcccagcgtgaggtggccgggcaggaagggaacgaggtgttccgccacgccgatgggcccgatgccgggaccgccgccgccgtgcggcatcgcgaaggttttatgcaggttcaggtggcagacgtccgcgccgatgcagccggggcaggtcagccccacctgggcgttcatgttggcgccgtccatgtacacctggccgccgttggcgtggacgatgtcgcagagttccctgatggtctgttcatacaccccgtgcgtggaggggtaggtgaccatgatgcaggagaggttgtcccggtgggtttccgcctgggctttcaggtcctccatgtcgatgttgccgccttcgtcgcatttgacgggcaccaccttgaggcccgccatggcggaggaagcggggttcgttccatgggcggaggtcgggatgaggcagacgtcgcggtggccttccccggcgtgcttctggtagcggcggatggccagcaggccggcgtattcccccgccgcgcccgcgttgggctggagggagacggcggcaaagcccgtgattttcgccaggcggtcggacaggacggagagcatttcccggatgccttccgactggtccgccggaacaaagggatgcagggagctggtttccggccacgtgatggggatcatctcggaagcggcgttcagcttcatcgtgcaggagcccagagggatcatggcttcgttcagggccaggtcccgtgattccagacggcggatgtagcgcatcatttccgtttcggaatggtaggagttgaaggccgtttccgtgcagaagggcgtctggcgcgtatggactggggcccaggcgggagtctcgcagcagcagggggcggaggtttccgcgcccgcaagggcggaggccagcgcctctacgtctgcgcaggtagcggtttcatccagggaaatggtgacgtggccggcatccaccttgcggatgttgtaacccgcttccagggctttccggaccatggcgtccgcctggccgggaacggtcagcagcagggtatcaaagaagtccttgttttcaatggtgatgccggcgttcgtgagcgccttgtacaggcttttggttttccggtggatttccgtgccgatgcgcttgaggccttcctgcccgtggtatacggcgtagaaagcggccagcacggccagcagcacctgggcggtgcagatgttggaggtggccttgtcgcggcggatgtgctgttcccgcgtttgcagggccaggcggtaggccgggcggccctgggtgtctatggacatgccgatgaggcggccgggcatgcggcgcttcagggcgtccgtgcaggacatgtaggcggcgtgggggccgccgaagcccatcggaacgccgaaacgctgcgtgttgccaatgcagatgtcagccccgaaggcgccgggttcccggatgacggtgagggccatcaggtccgccgccacgacgcagagcgcgcccgtggcatgcacgcgggagaagaagtccatgtagtcgcagatgcggccgagcgtgtccggatactggacgagtgccccggccaggtccgcgccaacggaggcggggtcaaaggaggtccagtcccccaccaggatgttaacgccctggaaggcggcgcgggtgcggatgacgctgatggtctgggggtggcaggtgtccgccacaaagaaggtgtttgccttggggcgcgcgttccggcacatggtgacggcttccgcggcagcggtgccttcatccagcagggaggcgttcgccaccggcaggcccgtcagggaggagaccatggtctggaagttcatgagcatttccaggcgtccctgggcgatttccggctgatagggcgtgtaggccgtataccagccgggattttccagtacgttgcgcaggatgacggagggcgtgatggtgccgtagtagccctggccgatgaaggttttcagaagcttgtttttccggaggatggaacggagttcctccagggcttccgtttccgatttggctgcgggcaggtccaggggatcctgcatccggatgtctgcgggaacgatgtccgcaatgagttcatcaagagtttggtagccgaggctgtcaagcatctcccggcgttcttccccctgggggccgatgtgccgtctggcaaagtctgagtgggtattcatgtggtatctggcaggtaatggaacccggccgcgggggccgggttaaattcaaaatgccccgggatggaatcaccggggcgggggagggaggaacgggtcaggaacagtattcctcgtagtccgtggcgttcatcatgtcttccgtttccgtgggaacgtccaggcggattttgtacagccagcctgctccgtaaggatcggagttgatgagggagggatcattggaaagttcttcattcacttccaggatttcaccggaaaccggggtgtacacgtcactggcggccttgacggattccacgacggcgacggggtcgccggcggcaacggtggcgcctacttcgggaaggtctacaaagactacatcggagagttcggcctgtgcatggtctgagatgccgatggtgccgatgtccccgtcaatttcaatccattcgtgatccttggaatacagcagattttctggtacgtcgtgcataagatgtaattgtttgaggtgagagtgtagtaaaatgcagtgtttgtcagtttatttttgcgccgtagtgtcaacctttcttataaaagggttttttaactaccacggcagggaatttccttccccttacgtcaatttccagctcggtgccgaccttggcatgggcgacaggcaggtaggccagggcaatgcccttcatcagtgaaggagagagcacgccgctggtaagttctccgatggcttctcctccgggaacgtgaacggcatagtgggcgcggggaggagctcccttgccggtgtattcaatagccaccaggcgctgggtgaggccgttggctttctgttcacgaagaatgtcggcgccggtgaagtccgtatccagcgcgcagaagaagccgagcccggcttccagaggcgttttgtccggagcgaggtcggaaccgttcagaggatagcacatttccaggcgcaggctgtcgcgcgcgcccaggccgcagggcttggcgcctgcgtcaaggaaggcttcaaaccatttgacgccttcccgggccggacagaagaattcaaagccgtcttccccggtatagccggtgcggcagacgaggaggtccgttccgtccaccgtgatgcgggagatgccgttgcggggggggagctccacgccgggaatgacgcgggcgaagatttctccgcatttggggccctggacggccagccccacatattcgtcggaatggttttccaggactacgtccgcgggcttgtgggcggagagccacgcgaagtcttcgtcaatcttggaggcgttcaccaccacgaagaaggtttccggctccatccggtacaggatgaggtcatcaatgactccggcccggtcattgagcatgatggagtattgcccctggccgatgtccagtttattgatgtcattggtcagcatggagttcagccatgcagccgctgcggcgccggccaccgtgaactggcccatgtgggagatgtcaaagatgccgcaggcttcgcgcacggctttgtgttcgtccaggatgccggtgtactgcaccggcatgttccagccggcgaagggaaccattctggctcccagttcaacgtgcttggctgccaaaggggtggatttgacgtcgggatcagtcatgaggcgatgtgaaggttatgagcaatctgctctctgcatcaggaaaagtcaatggaattccggtaaagctttgggctaaacattgaagcggaattcgaccacgtctccgtccttgacgacatattcctttccttcaatgcgcagcttgccgtgctcccgcgctccggccttgccgccgcaggataccaggtcgtcgtaatgcaccacttccgcagcgatgaagccgcgttcaaaatccgtgtggatgacgcccgccgcctggggggccttggccccggccgggatggtccaggcccgcgtttccttgactccggtggtgaggtaggtgcgcaggcccagaaggtggtacacggcgcggatgaggtcggaaacgccggaatcctgcacgcccagggattccaggaattcgcgggcttcttcatccgaaacgtcgatgagttcttcttcaatccgggcggagatgacaattgcctccgcgttgtggtgttccgccacgtattttttcacctgggagacgtaggggtgcgcgtccggattgttgatggcgtccgccagttcgtcttcattgacgttgcaggcaaagatgctttttttgtccgaaaggagctggaaggaatggagcagcttgcgttcgtcgtcatccagttgcgattcaaaggtgagggccggattgccctcattcaggtggggcagcagcttggtgatgagggccacctccgccttggcttccttgtctccgctgcgggccttgcgctcccgggaggaaagccttttgtccatggtggcgatgtccgccagaatgagctccgaattgatgatttcaatgtcgcgcagggggtccacggaaccaagctcgtggatgatgtcgtcattgtcaaagcagcgcaccacctgcacgatggcgtccacttcacggatattcgccaggaactggttgcccagtccggctccttccgaggcgcccttgaccaggccggcaatgtccacgaattcaatgagcgtggggatgattttttcagagccggacatgtcggaaagcacttgcaggcgggagtccggcaccgtgaccatgcccacgttcggatcaatggtgcagaagggataattggccgcctgggccttgcgggttctggtgaccgcgttgaagagggtggacttgccgacgttggggagacctacaatacctgcctgtaacataggcaggactgatagcggctcacgccgtgaaagtcaaataccaattgccgccgtgcatttatgcggcgtcacccagggcccatttgagcaggttttcagattccgcccagatgcgggacggatggcagccgagaacgacgacgatgacatggcggccgttgaagccggcggaggaaaccaggcagcggccggcggcgttcgtgtagccggttttcatgccggtgacccacgggtgctgggtgagcagcttgttggtgtttctcagcagaagcgtcttgccgttggcgcgggtgaaggcgtactggcgtttgcagatgatgttgcgcagttccggattgcggtagacgtaataggcgcagcgggccatgtcaatggcggtggagtactggtccgcggggagaccgttggggttgacgaagcgggagttgtacatgcccatctggcgcgccttggcgttcatcaactgggcgaaacggggaacggaccccgccgtgtcgcgggccagggccacggctacgtcattgaagctgcggatcatcagggcattgagcagttcccggcgggaatagacttctccggcgcggaagcccagcttggtgggatccgccttggtgtcggaaggctggataaccaccttcctgtccaggctgccgtgttcaaggacgaccatggccgtcacgagtttctgcgtgctggctacctggcggtgctggagtccgttgtgggagaaaagcacttttccggtgagggcgtccatgacgcaggcgctggcacatcggggcgtgcggggggcgctcggcggaatggctaccggacgcgtgggaaagttggcggggcggggaagggcgttggctaccggctgggaaagctgcgggggaacaggcgttgccagggggatgtaatcacttgaatccccatacgattggcagctcgtggagctcaggcaaagggtgaatcctgcgagaagggcgaacaaacgcatgtcttgttgctacagtaagaagtttcattcatcaagcccaaactccgcatttgaaagggagttggacaaaaaaaggccgcgggttgtttgatccgcggccttttctctctattaactacctatggaaccaaaaaccaccctggacggattttgagttacttttcccacccgtcggatagatcttgtgaagggtgagactttatcccgcaaaaagatgttcaaaatatgtccgtaaacggttatttttttaagaaatatttctgcatgtttttatgtttgcattaatataaacacgttatggggttttggccctgcatgtactgtctgttgcaggcatgagagttcttccgcaggccttgaagcgcgagggatcttcccttgttgacatatttaatttctggaataataactgttaggaggtagcttgacggctgttttagatgtttgagggtatttgttttgcatcatgagaagaaagttttttttgccggaagcagcccggaagcaaagaaaaaagtcattgcggagcatagacgattatggttccttaccataaatttgaatcatcatgaaagtttccgtcctgtttttgtcactggtagcctcctgcatggcctgcgccgaagttcttccgttcaagacgccctcttttgataccaagagatgcgctgacagcgccaagtcctccgtgtccatggagcagaaggaaacgtgcgttgaagtgaagctgctggacggggagaacagcatggaggcaatgattcccttccgggacaagaacgattacagtaacctggccgtttttgaaaaggcatttgccaaggagaatatttcaaagaagcttgatattttgaagaaggtggaaccgaggctggtcaagaccattatccggggcaaggaggtgaaatgcccggtggtgccgctcgtttctccgatcaagggagaggacggcttgatgctggcgcttttcctggcgtcctatgaaaagatagatttcaaggcccagcaggaaggccgctttcagaagaaaagaaacccggacgacatcaagtttgtatatggagtgatttttgaagtttccgatcccgtgtccaagaagaagctggccgccccagtcaagtgggagcaggcggagacgatttccgcctggattgatgccgtgcgcaaggaggttaagcagtaggagctttttctgttcctttaaccgggctgacgcgggctgtcgccgtccgggggcgccctgcctgctgttgagacatttccggaaagggaggagaactgtttagtgtcccttgtggttgatggaaaagtatccgcctgcatccggcgtgatttgccctgcaatttgcattctggacagaagcggcgtaatggcgcatgccggtttccccagtgaggcgcagagggtgtcaatggtattgaagcccatcctgacggcatggaggatttccttttcctccgcagtgggaggcagcggaggtgcagcggcggaaagggaggatggggaaaaaaggggcaggccctgttccggggcggtccatttcatgtcatgcaggatgtcggaggctccggcggccagcgtggctccgtcccggatgagggcgtggcagccgtcggaggaatgccggtcaaccgggccgggaatgcagaagacctcccgtccctgttcccctgccgtccgcgccgtgatcagggctccgctgcgtccggaggcttccaccaccagcgtcgcgcggctccagccgctcacgatgcggttgcgcatgggaaaggtggtgcgggaggggggcagctccatcgggaattcggagactaccgctccatggccgtccgcaatgcgctgcgccaggtttctgttttcccatggatacagcttgctgaggcccgctccgatgacggcgacggtgcgtcctcccgcatccagggctcccgtatgggcctccgtatccacgccgcgcgccagtccggaaatgacggttaccccggcctccgccaggtcatgagagacggttctggcgcatagcctgccgtagtgggtggccatgcgtgaaccgacgacggcgatggagcgttcggaatcccccgcggtccaggatccccaggaataaaggacgatgggcgcgtccgtcagctcgcgcagggcagcgggataggaggcgtcaaagaccgtggtgaccgtggcccccgccttatccgccagttccagctcccggtacggattgacgatgctccgccaggatgagatgtggcgagccagctgtgccccgatgccgggaatatccatcagcatggaggccggagcttccagaaccagttccggagaggcgaatacctgcatgaggcgcatgaccctgacagggcccagccccggtatcaggttcagggttatggcggcttcccggggcgtcatgaataaggggtcagttcctggtaaacgtccagatgggcctgaatcatatcctccatcttgtaaggggagggtatgtgacggggcaggggagggggctgggcgtaccagcgggaaagcagggcagccatggatgaggtgtcccccacggcgatgtttccttccggcaggaaggcgtccagttgttccttgactccgccgtgggcgtacccggcaacgggtctgcccagggcgagcgcctcaagggttgatttgccgaaggcctccgggcttttggtcagggaaagagtgacggaacaggtggaaatgatgtcccgcaggtcctggcggtggccggtccaggtgaaggcgtgggagacgccggcccgctcaatttcccggaggacttcgtttttatattcttcctttccctttttggtctctcccacgatgacggcgtgggccggaattccccgttccagaagctgtcttacaatgggaatcaggtccagctgccctttcaggcgcgtgatgcggcctggcaggcacagggtgaattttcccttgagctcgggataggacatatgccagcccgtgagccattcccgggaaggggagtagtccgggtggtgctggtccggggaaatggcattggggatgattctgatatggtcctcgggagtggacggataatgggtgaggatgtagtcccggatgcagttggaaacggcaatcacccgttccccccggctcatgatggcggagtaccggttgacggagtaaaagccgtgcacgctggtgacgaggccgggcctgtcttccggcggcagttttttccatgccaggtagcctacccaggcgggaacgcgggaatgaagatgcaggatgtccggcctgacggcctggagcagggcgcggagggcgccgatgcggaagaaggtggcgaggctttttttgccgatcggcatcaggatgtggcgggagccttccttttccagccggggaatcaggcgtccgccgccggagacgacgatgttttccacgccccgggcggaaaggccgctgcccagttccatgacgacttgttccacgcctccggattccatggaggggacgagatgtactattttcataaggcgtggagttggggaaagaatctggtgaggatgtagtctgcggcgcggtccgcctccagaaggggggctccgggcgctgccaggcggaagccctgctttttccagtcccggtatccggtgaccaagccttccttttccagcatttccaggccggacaggatgcgggatttacggttgccgtggcggcgggggacagccaggacgcctacgggcgcgcccgcgcccagcgcttcatataccatggagacgctgtcctggctgacccaggtggcggaggcgtgcgccagatgccgcgctacccaccccggctgcgtttcctccactggaacgacggtgatctccggaacggccgtctggattttctctgcaaagcccgtcggcgtccggcgcgaggtggtcagcacgatgttgccgggggtgttgatgctgatgtccgagagctggttgagcatggcttcgtcatcccagtcaaaatccttgctgggacctccgatgaggatcagggtgatgtccttcgggatggagggatcaggcctcatggggtgaagcgctccatgggtgggaaagatgcccgtatccgtatagtcgcgcccggggcgcaagtcatggcggggaatgaggcagaggtcaaaaaaggtgcagggaagcgtgggcttcatgcagaggacagcccgggtcttgaaatgatggcgggcgcagatgagcgggatgtgcgtggcgtgtccggcggagatgaacaggtctggctgcggcgtgtcgctgccggagacgaccttccggattttccccagaagggaaagtccctgcaggtccaccgtttccacggccccccctgctttggcaatcagagcctgcgccagtcccagggactggttgagatggccctgtttcccatcgctcagaatccggatgttcatataggtctattatgaagcggcggcagggtgcaggcaatccaatttccaccggattgaagaaaattcttggtggaaggggcgctcttgtccatgatgcgggcgtgctgacgccggatcccgctgttattaaagattccctgtgcgccgtgtcccggcagcttgggttttccggctgccgggtggcccgtgcgggaaggagcccgcatgcggaaaaattgttccaatggctggaacggggctggcacgccgggatggaatggatggcgcgttctccggagcggagggcggaccctgcggaggtgctttccggctgccgttccgtcatctgcctgtcctatgactatgacagccccgccatgcgtccggagggggagggaagcatctgcctttacgcccacggaagggactaccacggaattctggaagagaagctggcggatttgcaggaactgctttccatttacggcggcgagcaaaagggatatgtggacgccggacccgtcatggaacgggaccacgcggaagcgtgcggcctgggatggcgcggaagaagcggcctgatcgttcgcaggaagggaggctcgcgctttttcatcgccaccctgctgaccacactggagctggagccggacgctccggtctcccacgggtgcggaagctgccggcgctgtgcggacctgtgcccgacgggcgcaatcatggaaaacggccaggtggatgccggacgctgcctttcctactggacgattgaacaccggggatccattccggaggaaatacgccccctggtagggacacggctgtacgggtgcgacacctgcgtgacggtctgcccctggaacgggaagcccctgccggaggcggatgagcggttccgcatgtcccgcctgctggcctccattccgctgcgcgatctgcttgccctggatgccggcgtctttgcggacctgtttcggaattcccccctgaaaagaatcaagagggaggggctgctgcgcaacggctgcattgtgctggggaatgcgggaactccggatgacattgattttctgaaggcgctttccggggagtcccccctcgtggcggagcatgcttcctgggcggtggaacgcatcctgcgccgccacgggcggcatgcatgttcaagcggcgcaagagattaaaaatagaaaaaatgacgttttgctcttgtcaaaacctcaatttatggtatccatcttgccccaagcaatagctctgcgcgaggcagagaaaaataacagctagcaaatccaatccattatggcacgccttttcggtacagaaatacccaacgagaagcgcatcgaggcttcccttccgtatatttacggaatcgggcactcgacttctaagagaatcctggaacaagcaggcatcaatcccgacatccgtacgggacagcttaccgacgaacaactcacgaagattgttcaagtgatcaccactgacggaatcctgattgaaggtgaccttcgtcgtgaaaagcaatccattctcaagcgtctgacctccatcaactgctatcgcggtcagcgccaccgccgcggccttccggtccgtggccagcgtacccgcacgaatgcccgcacccgtaaaggcaagaagaagaccgttggcgcgcaggccaagaagaagtaatccggcaacctgaattttactatatagctttactatggctagcgaagaaatcaccaacgaaaccgccgaaaagcccgtggaagcggcagctcccgctcccgctgctgaaactccggccgccgctgtttccgctcctgaagaagtcaaaaagcccgaaccccgcaaggacatttttgcggaactcggtctgggcggcgatgatgacaagcccaaaatcctgaaggccaagggcagcaagaacgtttcctccggcgtggttcatgtttcctccacgttcaacaacaccgtcgtgaccgtcaccgaccagcgcggcaacgtgatcggctggtcctccgccggcaagatgggcttcaagggctcccgcaagagcacggcttacgccggccaggtggtttgccaggacgcctgccgccaagccatgggccacggtctgcgtgaagtggaagtgcgtgtgaagggaccgggttccggtcgtgaatccgccgtgcgtgccgtgcagacgatcggtattgaaatcacctccatcaaggacgtgacccccattccccacaacggctgccgtcccccgaaggcccgccgcgtctaattgaatccttttacctatagatcaaatatatcatggctcgttataccggtccccgcgataaagtgtcccgccgttttggcgttgctcttttcggttccaccaaggctcttgaaaagcgccccttcccccccggccagcatggcatgcgcgccggccgcaagaagaagtccgactacggcgtgatgcttgctgaaaagcagaagctgcgtttccaatacggtgtgcttgaaggccagttccgcaagtattatgcagaagccgcccgccgccgcggcattaccggcgacatcctgcttcagctccttgaactccgtctggacaatgttgtgtaccgtctcggtttcagcaacacccgcgccggcgcccgtcagctcgtttcccacggccatatcaccgtgaacggcaaaaagacgaacgttgcgtcctactcctgccgccctggcgatgtgatcgccgtcggtggaaaggcctcctcccagcagctggctacccgtttccttgacctgacccaggccactgtggttccggattggctggaatgcgaccgtgacaagctcacgggcaagattgctcgcgtaccttccaaggaagagattgctcccatcgtcaatgagcagctcatcgtggaattctactcccgttaatcttatttccttctggatttgcttcaaaaccccggttgccttttggcggccggggttttgggcgtttaagggaagaggatggagagttgagagttgagagttgagagttgagagtataggatgggggtatgacggatgatttgagcgaaaggggagtggccctttttgatatggacggaacattgctgccctgggatacgcaatacgttttttcctgtttcgtgctgaggctccatccatggcggcgcctgctggtgcttcttttcctggcctgcattcctctttatgttctgaggatatgggatgaaaaccggatgaagagggcctatctcatttatttgtggggactccccgcagaaacggtgcgggagtatggaaggaaattcggctctctggcacaggaatggatttatccggaactgaaggaacggctggaggaacaccggaagaagggggatctgtgcctcatggtttccgcctccccaaccttttacgcggaacctctgggtgagctgctgggatttaacggcgttctgggaacggacgtgcttctggacggccgcatgccggcgatgccggaattgccgaacggcaacaacaagggacagataaaggtggagcgcctgcgcgagcggaaggtgctgccggagcacggcgttctggataacgccgccgcctacagcgacagtggcgcggatatgcccatgctgctttcctgcggacaaagggtcctggtgaatccttctccttccctgaaggaagacgaacgcctggccggggcggaatgcctgtatcctgcccggccatggagaggaaagcttggcaagatctggaagattgctctttttgtcatggggatggtaaatataaatgttagaaaatcaatgattagctaactgtgggggagaaaaggctttacatttgtgacggaaatgtttcactttccttaacaagggggaaaagatacttttctttccttgttagcaaatcaacaattaataccctaaccaagtaatagtcatgcaaaccaagaacatcatcagtgttgcggcagctgtggcatcctttgccggcgctgctcttgcgggcactcccgtcaagattgttgctccgactccggttcccactcccgtggcgactgtcagcccgctgtccggcgatatctacgccggttatgcctccaattacaccagccgcggcatcgtggcttcccacgccttggtgggaggggatagcgttatccctgccggtgtaaatctgaattacaagctgagcgacgccaactccattgtgggtgccgcttcctacacctccctgacctccggtcacgagctgcttggcatgaaagatattgctttccacaatgaaaccaatttcaaccttggctggaagaaccaggacggtttgctgaagaacctgtccaccaccctcggctggaatctgattcatggcggtctgctcggcaactttgccaagtatgattacagcaacctccttgcaaacggcgtcgttggccagcgtcatgcccactccgtggctcaggaattctatctgaacctgaactatgacctgtgcagcaactggttcgccggtgtgaccactagctatggcttccagggaatgaccggatggtggttccagccgtatgtgggctggaaggcttccatctgccccgccacggacatcgtgatcacgggcggcatgtctgccactgccggctacttcgacagcaagtccgctttcatgtccaacggcgcgcaagcttggtgggtgaaggctgaactgcctgtcaagctgggcgtgaagaatctggccgtggttcccttcgtcagcttcaactgggccggcaacggcgccttgaaggctaacaagggcgtggacgcaggttccaagccttacaagaacttcggcgtggtggctggcgccaacctcgtctattccttctaagccgtccggcttacgattgaatcatgtttcaagagcggcggagcaatccgccgctctttttctttcatgttccggatggaggaaggagaaattgccgattaaggcggggactaagatccggccattgttcctgttccggccggtgatggcttaggaaaagccgtcacggatatggctgctgttgcactggctggaaaatttggggcagcggcagggccggatttttttattccttgcaggatgagcggcttgcggaggaattgactttccggggtaaaggagaattgctccgctccttttttgcttgttgccagaggcagtatttttattcagaatgccgcggaacaggagttccaagtttatgagtttttcctttttttctgctcttggggcggttctggccgtttccatttcaatttccctggcggagtcacgcattccggatgttccttccgatccgcctctgagacccgtgagcggcagcttgaaggcgggctattccacgaattacgaattccgcggcctgattcccggcggctgtaatcccacggcccccttgcgtctggactggagaagcgacctgaatgaccggtattccctgattctggcgttgaaggaggaaattttcctggggcatccggcggttgacttggagaatgagacaatggctgatcttgggcttcaaaggaagttcgggaaggccacttacgccgcattatccttccgtgcgaatgacggcggtttggcggggtttgcctccgaacatttgttcggcaacggtgggacaacgtatgaaacggcgctgattctgcgccatgatctgggcttcctgcccggtttttatgcgcagggaagcgccgcttattccttttacggcattacgggctggtggtttgacatgtgcaccgggtcggatttccggatgacggaaaacctttacatgggtttcaagttcggcgcggtgctgagttcctcctactggccttccggcagcaacggttggcagtccctgtacgtcagggtgacggcgaattaccgtttgttcgggaatatttttgtggagccgtttgtggggctgcactggctcggcaagggagcccacggagtgaaccgggtgtatgggagaacgctggtgaagggcaatagctgggtgacgggcgtcagcctggtttatagcttctgaccagttggaggtgtttccccctcctgcgggaagaggtccgcacgcatgcggatcatgtcaatgcactgcacgccgttgtcccagacgggttccgggtagttgtccgtaaagtggtttttgacgacgcctgaaatccggaagccacagctttcatacagggccattgggcccggggaggcatcgcacgttcccagttccgcatatcttgctcccttgttcctgatgatgtgcagggcgtgcagcaccagagcggttccgcaaccgtgccttctgtattcaggggctacggaacagttcatgatttcccatgtgtcttcccccgtttgccggatgacgatagctccggcggcagctccgcggctccgtgcgacgtaaagttcgccgtgggccagatggtccgctacctgccgttcgtccggatcggcatccagcagaagttccctgaggggagggggcggaggccacacggctgtttcctgcgccacatggaaggcaggggccatcattccgcgcgcatgaagatgatggagtccgccagcagttccccttgcaggctgtccccctggatgacgacgggctggccggaggtgataagccctttttccttcagcaggttcagagcggtggagatcatgcgggccgggtctttcaggaagggggattcaaaggcggtcacgtcgcgtgccagcgcgagctgccggacgacaacggggtcattgctgaaggcgaagatgggggcccgttccggcctgaggacggctgcctgcgtggcggccaagccgcggcgggtgaagatgaccatgcaggcgttttccacggagtccgccagggagatggctgccttggtggccttctgcctgtctccgttcaggatggcggaggcggcaaagttaaggttgccggagcgttccatgcggtgcgcgatggagtccaggacctccacgcagcgcacgggataatggcctacggaggtttctccggagagcatgacggcgtccgcctgttcaaagatggcgttggaaacgtccgtgacttccgcacgggtgggggtgggctgcgtgatcatggattccagcatgtgcgtggcgacgatgcagcggcgccccagcctgtggcagtggcgaataatgcggcgctggatgatgggaagttcctcaatgctgacttcaatgcccagatcgccgcgcgcgaccatgatgacgtctgcggccaggatgatgtcgtcaatgtggcggatggcctgctggtcctcgattttggcgacaatctgggcccttcctccaaggttgtcgatatgctcccggagctgggcgatgtgggcggcgtcccggacgaaggacatggctacgtagtccgtctcgcattccacggctacggccaggtccgccaggtctttttccgtcagggcggggagccgcagcgccacgccggggaggttgatgtggcggcgggagccgaatactccttccgtgagcaccttgcagatgagcctgtccgggcgcacttcctcaatgcgcatgagaatgcctccgttgtccaccaccatcgtatggcctacctggacgtcctgcaggagcccgtcatagttcaccgtggtggagaaggggagttccggcttggccgtgctcaggcggatttccagcgtgtccccttttttcagatggtagggttcgggcaggtccccggtgcggatggacggcccctggaggtcaaagagaatggctatgttcgcctgcagctccgcggctttccggcggatgcggaagacgacttcccggacccagtcgtgtttggagtggctcatgttgagccggaaaacgttggctccggcttcaataagctggcccagcatgtcggaagtgtctgttgctggtccaatggtgcagatgattttggtggcgcggggccgggaaggtgtgctcatggtctttgtcagtgcccatactgtatcctacgggacgttcaaatgaagttttttgtggtacatggcaggattgttgcatgtcacggagcggatgcgggagcatactggcggcatgaagcagatcagggttgaattgatcaacaccgggacggaaattttactggggagcattgtgaatacgaatgccgcgtggctgggcaacaggctgtttgaggccggattccgtgtggagagggagaccgtggttcccgacggctatgccattaacgaggccatgagggagagcgcccggcgggcggatatcgtgattgtgagcggaggcctgggaccgacgagcgacgatgtgaccagagaagccctgtgcgacgtgtgcggcgtggacatgcaccgtgacgagcaggtggcggagaggttgaagagctattttgaacgcagggggatttccattgcggaatgcaatttcaaacaggccatggttccggacggcgccgcggtgctggagaattccaacggcacggcgcccggcctggtgatgcctgccagcggttcccttcccatgttcatcctgctgcccggacctccgtcggagttgaaaccgatggtggagcagtcagtgatgccgcttctggaagatctggcggatgaggatattccgcatctgcgcgttttccggctggtaggaatcggggagagcgaccttcaggagctggtggatgattccctgcaccaggtggagggactggaggtggcgtattgcgcgcgcatcggagaggtggatgtgcgcctggtgggcagtgaagtggcgctgaaacagggggaggcgcgcctgcgcatcctggcaggagcgtatgtgctgactcccgcgggagtatccctggagaaggcggtggtgctccatctggcggaacaggggttgaaggtggcgacggcggaaagctgcaccggcggcctgattgccaagaggattacggatgtgccgggttcctccggcgtttttgagttcggctgggtgacttacgctgaccgggcaaagacgaagatgctgggggtgccggaggatatcctgaagcttcacggagcggtaagcgaacccgtggtgaaagcgatggcggagggggccctggaccgttccggtgccgatgtggcggttgccgtcagcggcattgcggggccgggaggcggctcgccggaaaaacctgtgggtaccgtatggctcgcctgggctttccgggggggagagacgcggacggagatgatgctttatccgcgggaccgagggtctttccggcagatggtttcccagaaggccctggcggggcttctggacgccagaagaagggagcaggttacggaatgaggaaccacacggggagcactccggcttcatgtagcccgctgatgaattcaaagatgccgatgaaccagatgaaccacagagcgtccacgatgttgtgcgtgaaggtggcaggattaacggagtaggttgcgggcggcggcttcagccgcgatagggagggaatgaaggaggggacgctccggcagtagttccggtaggcgtctccgaagagtgagatgagccgttcctgttccttcctgatgacggacgggtagtaaatgccgaaggccaatgccgtcagcagggggaccgtgaaggtttccgtggcgcacgctacgcctatgccgccgatgaagctgaaaaagtaaagcgggttgcggcacatggagtacggccctgcaatgacaaggacgttgtttttataaccagcaatgtagagggagcaccagatgcgcccgaaggcgcctatgccggccatgaaacaggccaggagcatgaggctttcttctatgagcggggacatttcccaccgggattccccaaagagcagggcgcagccgatagccaggccgaagaggagtgagatgagtgtgcggaagcgctcgttgagtgattttgcgtgggcttgcataatgctgaataaaggataatgaaaagatgttacggcctccggcaatggcgtgaagatgttttccgtgacgtttccgtcacccgcccggtgaatgcaaaagaggctgtacgcattagcgtacagcctcttgaagaaaaaatgggattccggaaatcaggcgcgcctgcggcgcagcatcagagttgccagccccagcaggctgagggtagccgtggcgggttccggcacggcgcccgctactacgtattgcaccttgacgtctccgttttccgtgtagaggtagtattggtcctgatagtccgctgcatttccttccatgaggccggaggccttggtcagcgcgctgccgtcttcagcggtaaagtcccccagggagatggaaccgccatcaaaaccggcggaggtgaccagcgtgcgggtaacgaactggaattctcccacagtcaggtccgtggatgtggtggccagcagtccggagacggagaagctggacgcgccccagattttctggttgacgttcatgatgcctccaataccgaagacaagccgtgcgccattgccgccgggatcaatgccgcagacggtgaggttgagggttccgtcaagggtgatgtcactgcttttgaagtccacttgcccgaggttgagggtggaaccggagccgaccgttacattccccgtatagcgggtgccgccgacggtaacgttgctgttgcccgtaacggtgatgccgccgccgtcggaggtgtccaccatggcgccgttgacgttgacggttccggcattgttgaagatgacatccgggccctggccgttgccgcggctggggatgccgttgctccagttgcccgcgttgcccagttcataggtgttgccttccgtagggccggccccaccggtccattccgtgaccatgctggcggcattggcgcaaacgcacaatccgcagagcatggcggcgatagataaggtttttttcatattaaaacagaaatgacttgataagtaagcccagaagagacgctggcgctgcaatgaggctaccggatttacaatccgtcacggtctgaaaccggagaaatgtccatctccttacagggagtaccgcataccttgcggcaattgaaatacgtgtgcccgtcaggacgtaccggcttccaggaaagagagttcgctaacgctccctttcaaattcaaatgccgcagaagcctgcggcattcctcgccccagtccgacagctcccgacgggtccccatctcatataaacagctcctcataggcggaggggcgtcatcgcaagttcttttcccttagaatcacagcttgactccggattgtaaatccgcagaaatttgaagctcggaagggattttattcgttttcctggtcgtgttcatccgcttcacgggtggagaagcgcatgagttccgcttcaaagtggagcggcacgtccccggtggggccgttgcggtttttagccaggtgcaggttggcccgtccggccatctgctggcgtttttcctcatcttccgcatagtaggcggagcggtagagcagcccgatcatgtcggcatcctgttcgatggagccggattcacgcaggtcggagatgcggggcacgcccaggctggcgcccgtacggctttccggtccgcggttgagctgggccaggacgatgacgggcactttgagttccttcgccagggccttgaggccggcggagatttccgccacttctcgttcgcggctgttggcggcctgcttggagtgggagcgcatgagctggaggtagtccacgccgatggcggccaggccgccctggtcccgcatgacgcggcgcgccttggcccggagttcgttgatggagatggcagccgtgtcgtcaatgacaagctgggaggcccccacttccttgaccgcctgcttgaagtgcttcatttcaagctgggtgaggttgcccctcttgatgatttcccggctgcggaccccggagcgggcgaagagaaggcgttccacgatctggaccgcgggcatttcacaggagaagagcagagtgggctttttttcattcagcgcaatgtgctcgacgatgttgagcaggaaggaggttttacccatggagggacgggcggcgatgatgaacatgtccccaggcttgaggccgttgctttttttgtccagttcttcaaaacccgtggtcagcccctggatctgtcccttgctggcaatgaatttttcaaagttggtgacagcctgcttgaggatgcttgccaggctttgttcgtccttggcgctgttgtagcgttcccgtatctggaagatgtgggtttccacggagtccagcagttccgccacgtcgtccggattgtcaaaggcctgggtggtggaccgggtggcgatgtcaatgatggagcggagaatgaatttgtccttcaggacgttgaggtagtgctcaaagtaggctccggtggtggtgaaggtgtagatttccgccaggcccgcgcttccgcccaccgcttccaattggtgcatgtcttccagggcctgggtgatggaaacgatgtcgatgggctcgtttttattgtaacgggtctggaagaggcgccagagcagtttatgcgcgggcaggtagaagtagtcctccgtcatgccgatggtcacgcactggcccacgtaagtggcggggtccatggccatgagggccagcacgcctttttccgggccaggagcctgcggaatgtccctgaggtccagggccggggctttgcggggggccttggtcagttccagcggggaggcggcggtgatggtttccgtagtttccatgatgcggcggcgggatgggtggcatccggctggaaaggaatagcacaacgaagggcggcgggcaataggcaacgtcgtaaattcagaaaagcctccttccgtcagagggacgttccaccgttgttttcccgttccttcctcagtctcaactggccgcaggcggcgttgatgtcatggcctttttcataccgcatggtaacggggatgcgcgccttgtggacggcatcccggaaggcgcggcagcggctctccgcagggcgttcccatgggagcccctccacagtgttgtatggaatgaggttgaccttggcgtgcaggcgcttggcgatccggacgagatgggatgcgtcgttcagggagtcgttcacgtcccggatgaggatgtattccagcgtgggcatctggttcctgtccttcccccattcctccaacgcgggaatgagctgggagaggggccattttttgttgaccggcatgatctggtcgcgcacctcgtccgtggctccgtgcagggagacggccagacggatttgcctgggataggcggccagttttttcaggccgggaacgaagcctgacgtggagatggtgatgtggcgcgcgcctatttccagcccgcggtgggaggtgatgatttccagggcgtcctccaggttgtcgaagttggagagcggttcccccatgcccatgaagacgaggttgttgacccgttttccggcgatggtttccgcagagaggatttgcccgatgatttccccggtcgtgaggttgcgtttgaggcccagcaggccggaggcgcagaatttgcagccgaaggcgcagcccacctgggaggaaacgcagagggtgatgcggtccgcctgttccccgttttccgcagtggcggcggggatgatgacggattctaccagactgccgtcttccattctggtcaggaatttccgtgtggtgtccgcagagccgtggacttccacgatttccggtgtgtggaaacggaagttttccgacagcaggtttctgagcgccgggggaaggttggtcatcgcgtcaaaggaggtgacgcgtttgcgccatacccagtccaggacctgctgggcacgggatttggtgtggccgcgttccgtcaggaaggcgagcagcttttcctccgtctgggcggtaatgaggggaagagagggcatagggttgaacggacccgttacagcagggaatccacgtagcggtcccggttgaagggttcaaagtcttcagctccttccccggttcccagaaaggcaggggagatgtgcatttcatccatgatggctacggccacgccgccttttccggagccgtccatcttggtgatgatgacggaatccaggggagtggccttgtggaattccctggcctgggccagggcgttcgcgcccgtggtggcgtccaccaccagcagggtgcggtggggggccgctgcatcctgcttggcgagggtgcggcggattttggagagttcctccataaggttatggcgcgtgtgcaggcgccccgcggtatcgcagataaggtattggaagccttcccggatggcctgagtgtgagcctcatagcaaacggaggccgggtcctggttgggcgctcccttgtagatgggaattcccagcttgtccgcccagctctggagctgttccacggcggcggcacggaaggtgtccgccgcggccaggagaacgcgggatccctgtttttgcagcaggtggcccagtttggcggcggaggtggtttttcccgtgccgttgacgcctacgaccagaatgaccagcggctttccctccggaggagcgggcagggacggagcggtagcaggaaaggcctggcggaggacttcacgggtggcttccaccaggttttccgcatccagtcccttgctttccctcagttggtccgcaatgttcatggcgcgccggatgccgatgtccgcagtaaccaggtccgcttccagttcatcccagtctatccgggaaccgcgggagaatttggtgaagagttttttaaagaatccagccatggtacagggtagtggttacgccgggcgttccgtttttgagatgccggccagcacgccgttgacgaagcggggggattccgcggaggagaagcgttccgccaggcggatggcttccgagatgacgatgggggcggccaggtctttgcggtgaaggagttcgtaggcgcccaggcgcaggatggcgcggtcaatggcgctgacgcgttccggagagtagttttccagggtgccgttgatggcggcgtccagttcgtcccggcggcgcagaatgtcttcccccagggctttggcttcacggtagagttcatccgcatcctttccggcttccaccacttttttcatttccgccagggaggggcggccgtccgggtggatgaggcagttgatgcggtcgttgatttcctggagcttgttgcaggaggaaacaaggggagcccagatgccgttgtaggcagggaagtccttgagggcatccagcaggcggcggcgcatctgcatcagggtggtgttgagttcctgcgcggcgtcacaggcggcggaaagcgcgcctttgtcattggaggggtcttcgtacagggtttttttcagttggagcagggaggcgttgaattccccttccttgaccagcaggtcctggagcaggtcgcggacgggcagggtgagggggtcgtgctgaagcttgtccgccgtttcctgcgcacgggtgacgaagaggcgcagcttgtccggatagtcccgggtcaggtggccggagacggccttggccctgagcttgcagtagtccccgcggaagggttccatcaggatgtcccagatgccttcgtcctgttcctgctcctcttccggagtctgggaggtggcgtagaggtattggagggctgcttgtctgatttggttgcgtgagagcatggcggtagagaagagagagggaggatgtgccttattgccgggagagggagttgaggaagagttccgccatgcgggctgcggtgcgggccgcttcccggccgcggttgagctgggaggcgatgcagcgggcaaaggcctgcttttcatcgttcaggagcaggacttcatgaatgacgggcgtggtgaattccagcgcgagccgcatcagggcctgcgtgatggtggacccgatgaggtccgcgtggtccgtgctgccgcgcaggatgactcccagggccaccacggcgtccgggcgtttttccggagagcgggagaggacggatttgatggtgaccgggatttcaaaggctcccggtacgcggatgatttccagccggactgcggggagcacggcttccagttcttccgagcagttgtctaccagggcctgggtgtattgctcattgtattccgaggcgacgatgcagattttggcgcgcgtgcccgtggcgcgctggcggcgtggaagttccgtggacatggagggatgggatggagtgggagtttacaggatgtggcccagcttgcattttttggtagccaggtatttgctgttttgttcgttgggggggatgacgaggggaacctgttccgtgattttaatgccgaagccttccagccccacgattttccgggggttgttggtgagcaggcgcaattggtccgctcccaggtcatgcagaatctgggcgccgatgccgtagtcgcgaaggtcgtccgggtagccgagcttgaggttggcttccacagtgtccagcccctgttcctggagcttgtaggccttgagttttgccgccaggccgatgccgcggccttcctggcgcaggtagaggagcacgccgccttcctgcgcaatgcggcgcatggcggtgtggagctggctgccgcagtcgcaccggcgggagccgaagacgtcccccgtaaggcattcgctgtgcacgcgcaccagcgtgggcttgtccggggagatttccccgtgcaccagggccaggtgaagggctccgtccagatgggattcatagaggtggcaaatgaagtcgccgtagtccgtgggcatcttgacggtttccaccaggcgtatctgcttttccttggcccggcggtattcgataagctgggccacggtgcaggctttcaggccatgttttttctggaagccgcccaggtcgccggtgcgggccatggtgccgtcttccttcatgatttcacagcagacgccggcaggctggagggccgccatgcgcacgaggtcgatggtggcttccgtatggccggcgcggcgcagcaccccgccgggaacggctcggagagggaaggtatggcctggctgcacaaagtcattgacggtggccttggggtccgccagcgtgcggatggtcagggcgcgttccgcggcgctgatgcccgtggtgatgtcatgggccgcatccacagagacggtgaaggcggtggacatgttttcccggttgacggaggtcatgagcgggagctggagggcgtccgcccgttccggggaaagcggggcgcagacgaggcccctggcgtgggtgaccatgaagttgatggcttccgtcgtagcgaattcggcggcaatgataaggtcagcctcgttttcacgaccggggtcgtccgtaacgatgatcatccgtccctgccgtatttcttccacggcttcgtcaacggtgcagaattgaagttggttgtccataaagggggtgaaaggagaggaggttatttttgctttttggcccaggagtccttaagggccacggtgcggttgaagacggcgcgcttgcccggtacatggtccctgcggtccgccacaaagtagccgaggcgttcaaactggcagcggaattcaggttccgcttcagccagggatggttccagcttggcgttcgtgatgacggtcagggagccgggattcatgacggagaggaaaccttcttccgcggcatccgggttttcttccgtgaagaggcggtcgtagatgcggatttcaccgtccacggcgtccctggtgcttacccagtggatggccgcccggcactggattccttccggagggttggagccgatggtgccggggatatgctcgcagaagatttccgtgatgtttccgtccgcatcctgccggtagtccgtacaggtgatgcagtagccgccgcggaggcgcactgtgcggccgggagccagtcggaagtatttcttgggcgggtccagcatgaagtcgtcccgttcaatccagacttcccgggtgatgggaagacggcgggttccttcctccggtttttccggattgttcagcacttccgccatttcctccgagccttccggcagagtagtgatggttaccttgaggggattgagcacggccatgcggcgcggagcgttggcgttcaggtcttcccttacgctgtattccagcagggccacgtccgtgaagccgttgaatttggtgatgcctatggtctggcagaagttgcggatggcggcgggcgtgtagccgcggcggcgcatgccggagacggtgggcatccggggatcgtcccagccgctgacgtgcccttcctgcaccagctggagcagcttgcgcttgctcatgacggtgtaggtgaggttgaggcgggcgaattccgtctggcgcgggcgtgccggcacggggcagttttcaatcacccagtcgtacaggggacggtggttttcaaattccagcgtgcagagggagtgggtgatgtgctcgtaggcatcctccagcgggtgggcgaagtcgtacatgggatagatgcaccatgtgccgcccgtgttgtggtgttccgcgaacatgatgcggtacagcacggggtcccgcatgttcatgttgctggaggccatgtctattttggcgcgcagaatggcttttccttccgggatttccccgtttttcatggcctgaaagcgtgccaggttttcttccatggaacggttccggtagggggattcctggccgggcacgttcacgttgccgcgctgggcgcgtatttcctccaccgtctgttcgtccacgtaggccagtcccttgttgatgagggcgacggcgcattcgtaaaagaaatcgaacatgttgctggcaaaaaagagattgtccccccagtcgaagcccagccagcggatgtcttcctggatgctgtccacatattcctggtcttccttgctggggttggtgtcgtcaaagcgcaggtggcagcgcgcgcccggaaattcctgggcgataccgaaattgaggcagatggatttggcatgtccgatatggaggtaaccattgggttccggaggaaagcgggttaccggtgcctgatgcttgccggaggcaaggtcatcagaaatcatatcgcggatgaaatctcggcgttcggcaggctgcaatgacatggcgaaaattctactaccaaatttccttctctgcaagcgtgttcactcggaatgacatggggaggaatacggcggataaagagagttttttatcttttcccggaaggccccggttataaaatttaaataatttatatataggaatgtttgggaatgtggatttctgatgaaggttggctaaaaaatccccagtcttttactaggaaaaaatgttgtcggccgcttcgtcttgttttcaaggttttgaggaatggttgtctgttatagaatattttaaatgtaagatacctaggctaaatttaaagttcaggaaaaaagaggtggaacgggatggttcgggaaagcggctgagctggagttcaatgggacatccttgaaaatttatgcagaataaccggcaaaaggaaagtttgaaagacaggtattgcaaaagaatcaaaaacgtgcatattgaactccggtgaatctgaattgtccacagtgcaaacgacatatcaatgttccttccgctgcggagggttccatggtgaattgcagcaaatgcggccatgagtttctttgcgacagggaaaagctgatccccaagaagccttttgccagggcgaagaaggccgttaccgtgcatacccccaaagaccgccgggaggccattcagagcgccttgatggaaacggggctgattcaactgatgtgcctttgcgcctccctggtcatcgccgccggctgcgtctggcttttttacaatgcctcttccgagatggacgggacctttttcctttccatgctgcagcagccccagcaaaaggcgttcgccctgtttttcgcctgtcttgcggggggcttgatggcctgcgccggacgcaggcacaagattgttttcattttgctgggctttctggtggcggggggcattgcctccctgcctttcgtgtatccggtcaaactgaatccctccctgctcggcgggaaggaagcggtcgcccaggctgaggaggaggaaggcgtctccggctttaccagcatgagcctggaacaactggccgaacagaacgcttccgttcagaattacggggaaggggatttgaagcccctgtttgccgccattgaccggaaagaggcccagggtgttctgggcgtgtgggtggtcggggtgaatgcggccaaccgggacatggtgaaggcgtatttgaagaggatggcccagtctgaggacgagccgattttttatgaccgcaaaggcacgggcggcggcttgttcgttattactcctactcccatcacatttaaggagtttgtggacgtggcggccaagatggggaacgtgactttgcaggacaaggagcgtttctttgtggaagtggttctgaaccgggacaagtttgaagcgcgcccggcttccgccgcgttgcaggatgaacgccaccagtatttcgtactggccaatttgaaggaattgtcctgtctggacatccggcgcgtgattgccgcagcaaagcgcctggcttccgtgaagccggacaagatgcgccatgaagtttccgccaagctggtggagcttctccgggagccgtgggggcgtgatgcggagtatgtgaccgctttggcttccgccctcgtcgtgtgggcggagccggataacgcggaggcgcagcgcgtggtttactatgtggctacggagttgaagaaggcggactgcgagattcctgcctctctggtcaggtttttgctgcacggtccggagaagaagagctttgcgctgcttctggatgaatggaaaaaggatccccagaagtgggaggacgagtgcaaggccgtcggtcccaccggggaagccgacattatccggctgatgaacgagtcggacgattttgtgctgaaacgttccgccgcccgtattcttggggaaatcggttcggaggcttccctgtccgcgctcaaggctttcacccatgacgccgacaacgaattgcgcctgtgcgcggagctgtccgtaaacctgattgaaaagcggctggggatagattcttccgcgaagaacccccagtagggacggcatccgtttccggaagagggcgggaggttttttatgcccggtctgattgggacgcgtcgcaccgctcttttttcagctgaatggttcacggggccggagggaaggcgcccgcgtttttttcttttgcggctgttttttcatgaagatgcggggaaaatggcaggaggtgtttttggagttattttaaacgatcttcctttcctgtacggcttcctaattgtttcttttgtgatatttttaccatttgggcgcatttgaggggaggaaagttgtttttgtcccggaagcatctcttttttggttgcggagaaaagccaatttactagaatgcaacgaccatgacagaccaagaaaacatgaaggccgccgttccggatgcggccaggcgatacatgcgctacctcctcatcatggccggtttgggcggcctgctctacggtgtggacgtcggcgtgattgctgcggcgctcccctacattgagcagacggctggtttcaatccctcccagctttcccaggtggtggcggccgtgctgttcggcagcgtgctttcttccctgtttgccgggtatctggcggacaagttgggacgcaaggcgctgattaccgtagccgccgccctgttcacggtgagtattcccgtgatctgcctgtcccaggaagtgttcggcatcatgctgctgggccgtattctccagggcgccagcgccggtattgtaggcgtggtggttcccctgtacctggctgagtgtttgagcgcggaatcccgtggcaaagggaccgggatgttccagttcctgctgacggtgggcctcgtgttcgccgccgtagtcggtctgcttgccgccagttatgtgggcggcgtggaaaattccggcgcgagcgaggaaacgctgacttccgccaagatttttgcgtggcaggccattttctgggtttgcgccgttcccggccttttcctgtttttcggttccttccgtttgagtgaatccccccgctacctgttccgccgcggccgcaaggatgaagccatggccgtgctggtgcgcagttatggagatgtgcgcgccaaggaggtgtttgatgaaatggtccacattgaagaggaagagaagcagaaggctgaagagcttaagaagcagagttcttccggtgaatcccttcttcagcgcaagtatgtgtatccctttgttctggcggtcctcgtcctggcgtttacgcaggccacgggtatcaactccgtgctgaattactccgtgaaggtgttccagcaggcgggcctggaaggcaccaccgccaactgggcggacttcaccatcaaggtggtgaactgcttgatgaccatcgtcgccatgatcctggtggaccgcaagggccgcaagttcctgctcaagatcggcactgccggcattgtggtgggtctgctcggcaccgggttcctgttcaataatgtggaaaaagcccgcaaggacgtgaccacggacgtggccgccctgctggccgcccagagcccttccgtccagaaggagtttgaccagggcaaggacgtaggctccatccgcacgctgcagctggaacgcacgcccgattcccccttcgtcaagaacctgcttgccaagaacggcatgggcgacaaggacatcaacaggatgcagctcatcatcacctatgaccagccggaagccaatcccgcctggtaccagttcctgatgggttcttccacccagctttccgtggtggaattttccgagctgaccaaggatgccaaggatatcaagaaggaagaggacaaggcttccctggccgtgatcaaggccgttccggattccaccaacaagatggtggtgaacggcaaggacggctatgccatgaagcccgtttccatcctgaaggcggaactgggcgagaagccggatacctccatgggctggggcgtgaccgccttcttcatcatcttcatcgcgttttatgccaccggccccggcgtgtgcgtctggctggccctgtccgaactgatgcccgcccgcatccgttccaacggcatggcgattgcgctgctgatcaaccagcttgtttccacgatcattgccggttccttccttccgtgggtgggaagctgcggctattccggcgtgttctttacgctgggcggcattacggtgctgtacttcattacggtgaccttcttcctgcctgaaaccaagggccgttccctggaggaaatcgaaggctatttcacaacaggcaagatgccggaagatctcaagatgatcggtgaaggcattgaagcggaagaataatcttccctcctgtggttttcaaagccgcctccctgtccgggggggcggctttttcatgttccgccagaggaaaatgtttgctccatggctccgggaacctggctgttccgggcttccggcatttccggaaggagcatgccgggcgtgtttaaagaccggaagagacggcttgcgtaaggtctcttttgtacgggagaggtccggggatgaatcctggaacgggcaggccaaggctctgctgcggctcgcttgaaagacccgtggcggacgggaacggccagacccctttttccgctttcactggaaaggaagatggcgctactcggtacgcggtgcttttttctgtttggcctgccagtctttaatggcttccgcaatggggggatacccgttttttatgtggaagtcataggcggtctggccgtcatcgttgcgaagggcgggattggcgccgttgtccatgaggcaaacggctatctcaggagagttgcaggccatcagcggcgtcaggccgtccacgtccggctggttggggtccgctcccgccttgatgagaagttcaatgagggggatgaggcgttccgccggtttttccttggtgcagaccagatgcaggggagactgcttgctttcaaagaagcgttcgttgacgtcgcagcctgccttgatgagccgttcgtaaatggcaggggaaaggctgaggaagccgactccgcgcgcctgggcgtttaacctgcgcttaaggtccggagaaccggcgtccagcagggccagggctattttttcctgtcccggatcagagtcattgagggcggcggagtacatgaacggggtgacgccccacggtcccggctggtccgggtcggccccgtgcttgagcagggactgcaccagcggcagcctgtcttccgccgtggagttcatgtaaaggcccgagaggcaggcccaggtgaggggggtgtctcccggttccttagtgccgtcatgcatgaagatggattgggcgttgacgggagcgcccgcttctatcatccggatggccagttgattcaatcccagggcaatgcagaggtgcaggggcgtgttgcggtccggagcctgaagcatgaggttgccagtctcccggaattgctccagcatccggtagcactggaggatggagtgggattcctgttgagcttctccggcgaacatgatttccaggggccaggagtcgtgcaggaagcggagggtaagtcccaggagcttttcatttgccgcctggatttcctgtttttccgcttccgtgagctggatcgtcctttcctccgcatccgccaggggggcggctgcgacggctgctgcggacagaagcagcatggaccctgtcatttgtctcatggcatccttataggggaaggaaagtggcctgtcacttcaaataaggggcattatcccagtttggagaggctgacatggactgcttccaccgtacggtcaatgtcttcttccgtatgggccgtagagatgaagcccgtttcatacggggagggggcaaagtagacgccctgttccagcatgttccagaagaagggtttgaagagttccttggaggctttttgcgcggagtccaggtcatagacttcctgctccgtgaagaagaggcagaacatggaacctgcgcggtggaaggtgtagttcctgccgtgcttccggatggcctcgcggatgccttcttccagacgcgcgccgagctgttccaggcggtcgtaggcgtttccgtccaggagctcccggagctgggcaaggcccgccgccatggcgacggggttgccggagagggtgcccgcctggtacacggggcccagcggggagaggcagtccatgatttccgcacggcctccaaaggcccccacggggaggccgccgccgatgaccttccccatgcaggtgaggtccggagtgatgccgtgaagctgctgcacgccgccgggcgcgacgcggaagcccgtcatgacttcgtcaaagatgagcagggaatcgtgccggagcgtgatttcccgcagaaaatggagaaaatcgttctgcgggaagtaaagccctgcgttagccgggaagggctccaggatgacggcggcgatgtcgctcccatggagttcaaaggcttttttcaccgcttcccggtcgttgtagggcaccgtaatggtgagctgggtcatttccctgggtacgcctgcgctgtccggttctccgaaggtgagcgccccggagcccgccgccaccagcagggagtccacatggccgtggtagcagccgatgaatttgatgattttgcggcgtccggtgtagccgcgcgccagcctgatggcggacatggttgcttccgttccggagttgaccatgcgcactttttccacggagggcaccatgcccgtaatcatttccgccatgtccacctccgccggcgcggggatgccgtagcccagccccctgtccacggcggcatggacggcatttagaacggtctgcggagcatggcccagaatggccgggccccaggtgccgatgtagtcaatgagctggcgtccgtccgcgtcagtgatgtaggctcccttggcggattggacaaagaaagggtcgccgtccacgttgcggaaggctctgacgggggagttgacgccgccggggatgacggcgcgcgcgcgggagaagagctgggcggactgattcatgtgctgagggaagcaaaaagggcaaaccttgagaaagggttgccctcattgaaatgggttctattcccgaaccaatactgatttaagcttcaggagcggaagcgggagcttcagcggtttcgggagcggcttcttcgctcttgttgctgtaacgccattttaccttgttgcgcttgctggcggaacgggccttgcggcggcgttcgtccatcggggtttcaaaggcgcggcggcggcgcatttcatccagaatgccttcaacatccagttttgttttgaggcgcttaagagcgcggtcgataggttcaccttttcttacggtaacttcacgcatgatttgttttcctttttctattcgtccgggaacgggagacaatacgtagtgctttcctgcttacaggtcaagatttttatcatggctgacctattttttgcccttgaaagaagggttccgacgttcgcagcgggtgcgaacgcctgcatgatgcggttttcccgctccggaacgggcttcaactgtccttgccttacagtggggggcgtgatagaaaggaacgtctcccatgaaccggctgcatacattgattgacggatttccccgcgtgcggattctctgcatcggggacgtaatgctggacaagttcctgtacgggagcgtcagccggatttccccggaggctccggttcccatcatgaagatggaccgggagacgcgcatgctgggcggcgcgggcaacgtggtgactaacctgtgcgcgctgggatgccgcaccaccttcgtcagcgtggtggggaatgacggccatggacggcaggtaaggcgttttctggaagagacgtgctgcgttccggagctggtggagtgcgaagggtatgagacgaccgtgaaggtccgttttgtggcggggaagcaccatttgctgagggcggaccaggaacagtcgctgcggatggttccggagctggcctcccgttttctggaacgggtggacgcctgcctgccggaggccgaccttgttcttttgtccgattacgggaaagggctgtttgacgggcagacaacccctgacgtgatcgcccggtgccgtgcggcgggcaagtccgtgattgtggatccgaagggttcggattactcccgttacaagggggccacgctggtgaagcccaatatgaaggagttccaggaggcgaccggggtgacgctgaatccttccgcgacagggtgggaaagggatgccatcgcaggggcgcaacggctgttttccgagttcggcattgagaatttgctcgtcaccctgagcgagcacggcatgattttcattccttcctccaatccttccgattttgtctgcattcccacggaggcccgtgaggtttttgacgtgtccggagcgggggatacctccctcgccagcctgggcgcggcgctggcggccggagctacggtgccggaggccctggtggtgtccaacgtggccgccggaatcgtggtgggcaagttcgggacggccagcgtgaccggagcggagctgaagaaggcgctggaggagaaggccctcaaggcgtcctcctggcatcaccggaacaatattctgacgccggaagccgcggcggagctggcggagcgtttccgacgggagaagaaggtggtggggtttacgaacggttgttttgacctgctgcacctggggcacctgcattccttcatgaaggcgcggaaagcgtgcgacgtgcttttcgtggggctgaatacggacgcctccatcaagcggttgaagggagaggacaggccgatcaataatgaggagatgcgttccctgctgctggcctccctggattttatcgattacgtggtgccgtttgacgaggatacggccctgccgttgattgagaagttgcgcccggacgtgatcgccaaggagggctatcctctggaacgctggccggaagggcagtacgtcatatcttacgggggacaggctcttgagcttccccgcctggagggcttttcctccaccaatatcatcaaccgcatgaagaacagtccggaatgagcgagtacatcaggaatcagattttaggaatagcggataatttcaaggctctggccgccatggccggagagattgaacaagtcgcccgcgtctgcgcggataccctcaaggccgggaacaagatcatgttctgcggcaacggaggctccgccgcggattcccagcacctggccgccgagctggtgggccgctacaagctgaaccgtcccgccatgaatgcgctggccctgacggtggatacctccatcctgaccgccgtagggaatgattacgggtatgaaacggtcttttccaggcaattgcagggattaggccgttccggtgacctgctggtggggctttccacgagcggcaatagccagaacatcgtcctggcgatggagctggcgcgccgcatgggcgtcaggaccgtggccctgacgggccagggcggcggggagatgagggactgtgcggatttctgcattgccgtcccctcccatgccacgaacaatatccaggagatgcacattgccgtgggccatctggtctgcgagctggttgagcaggaaatgtatggcagctaaggctctgtttctggaccgggacggcgtggtcaatgtggacggcggctacgtgcaccgcattgaggattttcagctggttcccggtattctggacctttgccgccgggcgaaggagaaggggtatctggtgctggtggtgaccaaccagtccggcataggccgcggcatgtttacggaaggggatttcacccggctgacggagcatatgaaaggcgcgttcagcgccgccggagcggagatagcggacgtgttccactgtcccagcgtggatgacggccatcctgaccggaagccgaatcccggcctgtttttgaaagccgccgccgcccatggactggatatggcggcttgcgtgtccgtgggcgaccgggagcgcgacattcgcgctgcgcttgctgccggagtggggcggaatttccttttttccgcggaagatgtcccgactctcgccacagcccgtgtggaggcgttggaagaagtagcggcgtggctgtaagcttgggagtgattgctcaggactgccctgtcagccctccccgtgttccggccgccgggatgtaatgatggatgttcctgcttcaaaaagaaagctttacaagggaatgaatatttcttatctatccaataggatgaaacccttgctacccctgttattgattgcgttgtttcctggcctgtgcgccgctgccaaaaccgcagagccggccatgcccgagcggctggaaaaaagagaagcggccacccgcattacctatcagggcggagacggctccagctttgagaaggccgtcgtgattgccggagcgaaaagttcgatggatggcgttcctgccgaacggaaatggctcaagaagaagtacggaaattacgaaaagctcaagcaggcgctcgtcaaggaaggaggcaagtattatgacctggtcacgatcaggacgaaaaaaggcaaggagctggtcgtctatttcgatatttccggattcttcaatcgtgaagaataggggaggccgttcttttgcaactcttgatggcgtgccgtccccggctgtctgcccggtcgttcccgtgttttagcacattcccgcttttcccgtcccgggagctgctcctccagcggcggccgtcgcgatgtggaaccgggcatgaaggagggaaacggagagccgggttgggaatccggcggtgtttgcgggaacaaccggattcctgaatgacttatccccggaagaggcaacttcccgaatggggcgaagtaatttgacatacggggagcgccctgttagaagtggggcgattggtccgtaatttcgtggacttgtcctgtacaggctttttacttttgctcatatgaacttgatttccttccgatccatgatggcggttacggcgctgggagccggccttgcccttccggtgttcgcccagtcctcttctccggcctcttcctccgcgcctgcggcctcccgcgccaaaaaaacggccaagatgccggtgtatcccatcccgcagaagatgaccaggagcggcggttccgtgacggttccggccctgaagctgtcgggagcgcgggacgaacctaccgtgaatacgctgaagagcatattttccatcgctccgaacgggctgcccgtgcagatgtccatcatcaaggggagcaaaaaggccgccgggaatgttccgcagaaggccggggcttattccctgagcgtcacgccgcagggcatccggatgacgggctatgacgacgaaggcctgttttacgcggcccagacgctgcttcaactggcggagaagactccttccggcgtaacggtgcctgtggtggaggttctggactggccggacgttcccttccgcggcaccattgaaggcttttacggcctgccctgggggcaggaaggacgcatcagccagttcaagttttacgggaagtacaagatgaatacttacatctacggcccgaaggacgacgtgttccacggtttttccaagcgttggcgcgagccgtatcccgcggacatggcgaaggacctgaaagagctggtgaaggtcgcgaaacagaacaaggtgaattttgtctgggcggtgcaccccggagcggacattcactggggggaggcggaccggaaagccgccgtgaagaagtttgagatgatgtatgacctggggttccgctcctttgccgtgttttttgacgacatcggcggggagggcgccaaaccggaaggccaggtggagttcctgaattacctgaacaaggagtttatccacaagaagccagacgtgactccgctgatcgtgtgccccacggcgtattccggcggaggtggccgctaccacgaggtgatgggggaacatctggacaaggacatcggcatcatgtggaccgggtccagcatcgtgagcgatatccggaccccggccttgaaggggatcaacaagtatttgcagcggccggcgttcatctggtggaatttcccggtgacggattacgtgcgccacgccctgttcctggggcgcacctatggcgtggatgcggacgcgatgccgttcatgcaggggtttgcctccaatccgatggacaagccggaggcctccaagatttccctgttcagcgtggctaacatgacctggaatgccaaggcctatgattccgacaagacatggaaggacagcatccggattttgttccccggctgtgcctccgccatgcagacgtttgccgaccataacagcgacggggggcccagcgggcacaattaccgcaaggaggagtccgtagagattgcccccgtggtggagcaggtgctggaattgtgccgccgcggcgccaaggtgtctgaaagcaaggcgtttgaccgcctgaaggccgagtttgcgaagatggcccaggctccggacatgatccgggcgaaatcgaacaatcccgctttcgtcgcagaggtagagccgtggctcatccagttcgagtccctgggcaaagctggaatgaacagcatgcagatgattgaggccacggaggcgggaaatgcctccggagcgctgaattacgccatggaggccgcctgcctgcttgccgagatgcagcgttacagcaaggagatcagcaaggccatcaacaagcacgtgacggaggtgaccaagaaaaattccccgtggcagaccgccgtcaagccgtccgaactggtgatggcccctgccgtgcgggagctgctggacatggggtccacccccgtgctttcccgtgtgagcggacaggccgttggccgtgtgaagccttatgtttccaccaagtccaagggagggatcgagaagatgctggatgacgatcccgagtccttctattattgcaaggaggtccagaagaagggcgactttttcggcgtggacctgggcgctccgcgggagatacgcaccgtttccatcgtgatgggccgcaatgattccgatacggatgccgtgaacaagggccagcttgaggtatccatggacgggcagtcctggtcgcccctgatgccggagtccagcgggcttcgcgtggagtaccagggaaatggcaagaagggccgttttgtacgctaccgtgctacggcgcagggtgttccgggcgggaagtccgacgtgtggacggccatccgggatttcaaggtgaatgcccccgccgcgccttccgtgctgacggatgcccccgcgttcaagagtgccgtggttgaagtcggagacaaggatatttccctgaagcgcatcatggaggtgcatcctctggcgccgaagaagtccctggggcttcaaattccggcgggagcatccgtggagtccgcctccgtcaatttgaagacgccggacatgaagtgggccaaattgtacatttccatggacggaaagtcctggacggaggttccgttgaaggcggacggttccgcggagattggcggcgtgatcaagggcatcaggctgttgaacgccggatcctccccgcaggaggtgactctggaagagttcaagctgaatcttgccaacaagggaggaaagtctgccgacaacggagccgccggggatttcaacctggctacgttcctcccggtggagctgtctccggagaaggtggagattccctgtgattccccccgtgcgaattccgccattgtcctgtccgacggtaaggaagcttccgtgctggcctgcggggccgacggacggtgggctcccgtgggcaatctggccaagggcaggaaggtgaatacgttcagcctgaagtccgtcaagaagccggtgaaggccctcggcctgaccgggaagaagggaagctccgtgaatgtttttgaagtgatctggaagtaacgggttccgccgggggctggcgcatgcggcagtcttccgcggggcgatgcccgttgatcctggggcggctgtttcctccgtggaatggccgccccggcttttttcagttcctggtttgccgggaggcgcgtttttccgccaggtgcatgcagccgaggacgagggctatgatgaccagcggacccaggatgtccgcataccccaccatgcccgtgttcacgggggccacgcagagcaggaaccaccaggccagggtcagcaggcggagcaggggcggagctccgttgccggagaggaagacgtagatgacgagagcccatagctgcgggaaacggggcagcgtgaccagccattcccggtggtccccgccgggccagacaagcgtgccgtaggagccggctgcggggaggtcgccccacatggctcccgcgggaagcgccaggttcatcagcaggttcaggagcagtcccgcataaacggcgatcatcagggccctccattgggcgcccgtacgcaccgccaggaacaggaaagcgggcaccagcaggaaaggcgtcagttccagcgctcccatccaggcggggaggacggtgcctatttcagcgtagcggtccgcgccctgtggaacggcggaaagaagagcccagtacaggagcatcaggagaatgcagcggtacctggcaccctggcccaccgggcgttcctcatccggaggaaggcccagccatgctccggaatggggctggttggaggggtactgcatggcgggttgggaatggagccttttgtaacgggaataggcggctttgtcaataaagcccggttcaggtccggaaccgggattgtttttcaacaaaatgggcattcctgctgtccacattgtgacaaagttgttgccatcggattcttgccgcgggcggcttcttctgctagtcggtgcctgaaagggcgcggaaaaatggctgtgccccagtaactcattccttttgattatgtcccattccagattactgacgattttaccggccctgtttttctgcctgctggctgtttcctgcggaaggaaggagaaggacgatccgaacgtcattgaattgaacttcggccattttcccaacgtgacgcatgtgcagggcctggtggcacaccatttttcccggcaggggaaggggtggtttgaggaacggctgaaggaggccaccggaaaggatgtcaggatcaactggtacgtatacaatgccggccccagcgccatggaggccgtgtttgcccgctccattgaattggcttacgtggggcccagcccggccatcaatgcgtttgtgcgttcccgcggggatgatatcaggatgattgccggggctgtggaaggaggcgccgccctggtggttccggaggattccaccctgaaggagcctgctgatttccgcggcaaggtgattgccactccccagctggggaatacgcaggatgtttccgcccgcgcctggttttcccgcggcggcctgcacgtgacgcagcgcggcggggacgtgacgattctgcccacccccaatccggagcagctcagcctgttccggcagggcaagctggacggcgtgtggacggtggagccgtgggtgagccgcctggtgatgacggcggggggaaaggtgctggtgaacgagaaggagtccatcgctaccgtgctggtatgcggagcggatttcctcaaggagaagccggaggtggcgaaggccctggtgcaggcgcatgaagagctgaatgaatggatcaggcagcatccggaggaggcccgggcgatcgtggtcaaggaactggaggaactgacccattccaggatagacccggcgttgattgcggaggcctggaagagcatcgtcatgaaggacaggatttccattcccaagctccagcagtttgtgcgggacgcccatgaggccggtttcatgaaagaggttccggacgtgggcggcctggtagtgcctgaggcggcggaggaacagttgaccatggtgaaggaggctgccggaagatgattgtgggtgaagaacattgcggccccggagggtgcaagctccgcattgccggcgtgagcaaggtgtttgacgggcggcgcggaaaggtggtggcgctggagggcatcaatttgaatatcaggagcggcgagttcgtctgcctggtgggggccagcggctgcggaaagacttccctgctgaatatcatcgccgggctggagtttcccacttccggggtggttgaactggacggggttcccgtgacggggcccggacgggaccgcaccgtgatgttccaggagtccgccctgtttccgtggctggacgtgatggggaacgtaatgttcggcctgaagctgacgcccggcctgacgcggggggaccggctcgccattgcggagaagaatctggagctggtagggctgaaggaatgcgcgcattcccatattcatgaactttccggcgggatgaagcagcgcgtggcgcttgcccgcgccctggctaccagcccccgcatcctgctgatggacgaaccttttgccgccctggacgccatgacccgcgaacagctttaccaggatattcaggatatccatttccgttgcggcatgacgatcattttcgtcacgcacaatatgcgcgaggccgtatgcctgggggaccgcgtggtgctgtttactccgcatccgggccgggtctgtgaggagtatttcgtggaccttccccatcccagggatatcaacagccgcgatctggcacagttgtcatcccgcatcacccgtgatttgaaaggagccatggcatgaacaggaacaaatggtccaagtggggcgcccatgcctgctcgctcgtgtttttcattctcgtgatctggttgtggcagtatttgagcgaccagaaggtctggaagccctatttgtttccctctccgctggaggtgtgggagtatttatgctcctccttcctggacggatctctggaggaagcttcatggattactgtgaagaggctggtgatggggtatggaataggcctggtgatggggattcccctgggcatgctgtgttcccgcttccagctcatgcagaataccctgggcctcgtttccctggggttccaggccctcccgagcgtatgctgggttccgctggctaccctgtggttcggccagacggagggtgccatgctgttcgtggtgatcatggggacgctgtggtccgtgattctggcgacggccaacggcatgaggaacgttccgcccatttatgcccgcgcagcgcgcaccatgggcgctggccccatttattgcctgattcacgtgacgctacctgcctccgccccgtttgtggtgagcgggatgaagcagggctgggcctttgcgtggcgttccctgatggcggcggaaattttcgttcccatcctgaccggcttcggcctggggcagcttctgcactttggccgggagttgaacgcgatgaaccaggtggtgggcatcatgttcgtgatcgtggtgatcggcctgctgtctgacaagattctgttttccccgctggaacggttcctgcaccgccgctgggggacggggcaggcctgagggctgcgccttgcagacacagatgagctggttgcgttcggcgaggggaaagcccgttacttgccgggggattccaggttccttttaagagcgtggacttccttgatgagggccgggagctttttgagcgcggcatactggcggctggcgtccttgaacggagatgccgggaaaccccagtaggcgacgttttccgggatgtccgagatgactcccgttttggctcccagaacggatttcgaaccgattttaaggtgtccggagatgccgacctgggcggcgatagttgcgtagtcgcccaccttggtgctgccggcgattccggattgggcgacaatcacgcaatgcttgccgacgacgacgttgtggccgagctggataaggttgtctatcttggtgccttcccccacgatggtgcggccgaacctggcacggtcaatggtggtgttggctcctacgtccacgtcgtcccccagctccacgatgcccacctggtcaatgcccacgtaacggccgttgtcccccatcaggaagccgaagccgtcggaaccgatgacggcccccggctggatggtcacccggctgccgagcttgcagcgttcccggatgatgacatgggcgtgcaggcggcagttttcccccatcgtgacgccgtccccgatgtcgcagccgttgccgatgtccgtgccgtcgccaattacgcaatgggcgccgatgcaggtataggcgcccacatggattttgtccggattgaaggtggccgtggggtcgataatggctgtgggatggatgccgggcgtgaaccggtaggcggaagccatgaagtatttcaccagggcgttgaatgccatggaaggattgtccacttccacaaaggcgacgttttccgggtacgcgggcagggccggaggcaccaggacgattccggcagaggtgtgaagaaagtcttcgaagtatttctcgttgccgaggaaggaggcttcctcatgagatgcgtcgagaagggaagcgaccccgaacacagtcagttcggggtcgccagaaaggattttccccccggtgagggcggccacggcttcaagtgtaagcttcatgggagtatgattccgccttcccgggggtaatgtcaagggttagttggccggagccgcgggagcggcaggaacggccggggtctttttcttggtggggtcaaagcccttgggagcgtccttgttgagttccttcatcacggagggggtgatgtccatgctgggcttcgtgtacacgaagacctggttggaacggagagcctgggcgctcttgtccagaatgaggtcatagttgcccttggtggcgatgccttccgtgatcttggtgatttcacccatgatcttggtggagcgcaccttcatctgttcctgaagggacttgagctggcgttccacgaagccgcggcgttcctgttccagcgcgatgacttcctgacgcttgatctgggctttctgttccagctccttcttgtccttttcattcagcatgggatcctgaagctgtttgaccatgtcgttgaagtcggcttccatcttcttgatggtttccgcgcgggtgttgttggtttcctgcacggtctgggcagccttgtctacttctgcctgggcttcatgggtcttatagtagtcggcgaagagtttctgcacgtccaccgttgctactttaagttcggcgttggcagtggcgcttaatgccattgcagctgatacacataatgctgttttgaagaatctcataatttttagcgtcttctgactttgccagtttacatgtggaacggcatgcgtcaaccttctagctatatttcaggattgaacttttgtcatcatggggccactttaggcgcatgcaaacattttccaccaaggcccagttgaaggcggcccttctcaagcatcaccgcaagcatgaccacgtggttctcgttcccacgatgggagcgcttcacggcgggcaccgcgccctgctggaacaggcccgcaagctggccggggaggacggcgtggtggtggccagcattttcgtcaatcccatccagttcaacaattcctccgacctccagacctatccccgcacccctgaaaaggatttggaggtgtgcgagggagcgggcgtggattacgtgttttccccctccccggaggagatgtattccggggagcgcagcattaccgtggaggagagctttttatccgctacgctgtgcggggcgtcccgccccggacatttttccggcgtctgcacggtgcttgccaagttgttcaacctggtgcagcccacggacgccattttcggcaagaaggattaccagcagctggcgattatccgccgcatggtgcgtgacctggatttcccggtgcacatccacggggcggagattgtgaggcatgggaacggcctggcctattcctcccggaacgcccggctgacggcggaacagaaagagcaggccgtggtgatacggaaggccatgcttcaggccagggacgagttccgggccggaacggatgtccggacggtgaaggaacatgccgccgccatgattggggccgtgcccggcacgcgcatcgattatctggagattgtggatgcggagacgatgcagccgctggaggagaaccggaatccggccctgatggccgccgccgtctattttggcgacgtgcgtcttattgacaatatagaactttaatccggcacggattcccttatactgcgcccgtgattaccgccgccaacctccaccgcagctattccatcggcaagaaatccattgagatcctgcacggggtggacctgcacattgccgccggggagaaggtgttcctgtgcggtcccagcggagccggcaagaccacgctgatgtacacgctggccgggctggagacgccccaggagggaaaggtgacgattgacggcacggatatttacgccttgtccgctacggcgcggtccgtgttccggaaccggaacatgggattcattttccagaattacctgctgatgccggaactgacggcgctggaaaacgcgtgcctggcttcctccataggaaggaggccgcgcgtggagtacgtgacggagctgatggcgcgcgtgggcctgtcccaccgcctgaaccatctgcccagcgagctgagcggcggggagcagcagcgcgtggcgatcgcccgcgccctggcgaatgacgccccgattatttttgcagatgaacctaccgggaacctggaccggaagaacggcgcggaggtgctggaccttttgttcggcctggcggacgaatcccgcaagacgctggtaatcgtgacgcatgacgaacacctggcccgccggggggaccgcatcatcacgatcatggacgggcaggcggtctgaggccgtccggtcctgcgagttttttatctctccttttatttgccgtccgccgccaaatgcaggacggcctggtgcacgccccggaccacctgggccatgcggcggtagtccagcgtttccggcaggtctccgggctgatggtagttcgggttccggaagaaggaggtgtccgtaatcatgacggcgggcaggtctttggcccagaagttgcggtggtcggagaagtccatgcacatgcccttgatttccggcaggttcaggcggacggtaggcaggaaggactgcatgtttttctggactgtccgcgccagcctgacgctgtcccagttgccgacgatggcgatgaagtcccccttgtccgggtacagggcgcccatgcccgcggcggggtaggactggctgttttccctgtccgagaagtagccgatcatttccaggcagatcatggctttcacgcctatctgttccgtataaagtttttgggcgtgctgcgcgctgcccatctgttccgtgccgaagtagggcggttcctcgttggcatacgcgatgagttcaatggtgtcatggggggagatgcccttgagcatgcgtcccagggccagcagtccggctacgccgctggcgttgtcgtccgctccgggggtgcttccgcaggtgtcgtaatgagcgccgacgatgacccttttggcggatttgccggggaaaacggcgctgacgttgacgaaggtgcgcttgtccgccgtgaaaggctggtatgtgaccgtagctcccgattccgacagggaccgggcgatgtattggaccgccctggcctggttcttttcataacccgccgggcgcgggtggcaggttttggccaggtagaggacgtcctttttcagttcctgctccagccccgggcggacggccgcggcgggagcgccgccggccgcgggggtggtgcagtgggaaatgatgcagcccgtggagacggtgaggatggccagggcggaaaacagagagagataaacccggagcttcatgctccctttatatcaatctatgtctggcgtgacaatttcaatgtgagaggtctaatatggagtattcctgcatgtttttctcagcaaatcataaatcgccgttttttaccggtgaggcggcaagagggataacaccggacccctgaatacagcctgtattttatatgggaaagggagcaatctactctttttaggattaggaaagagttgctgaatgtccggcgaaactgaagtttactggagcggtgagattaacgggcctcactaggatggtcatttgaacgttccggttgaattgacaatgttgttgttcactgaaggaataaccttgggaaaatcgatcgtcatcacttccataagcatcaatcttattttccggatcaaagataagatgtttgccttgtttattctttgtcaggagaacggcatgccgttcatcgccacttgcgttggaggcggtaacgatcacacttgggtaacctaactgagcccaaagaatatgcagtaaaatgcaccgttccctgcaaaaggcgattctgcgttcaaacaaagtcatcaaagggacaatagggtttattcgataatattccgttcgttcctgttgcttggattctacctcttctccctggagaggtcgtccgaaggtggtgacgaaattccagatgtccgcaaagtcttcggagagtgcctgaatacgtggatagttttccagtttcgtattttgaagaattccgttaatgagcgctgtttcacttccattagtgtattcattattaaggaactgtacgttttgtaaattcattgttttgattatgtaatgtttactgtttttatgatttggattttctgctgcataggtatcttcccagagcagttttccggtgttccgggttcgcgcagaatggcacacctgaatttccactataggttttcgcgctgatattgccttcttgcttttcccgagagtgcattacttttgccgaaagcatcagacttcaatcggaacttctcatctagagggaatcgtccgattttcaggttttccgttcgtggttgcttcatccggcacaaaaattgaagggaaaggatcggtattgcaatcatgcgggttgttgtgtagcttgttgcgcatgtgggactggattatgatcaaggatgcgctccgggcgatcgttgaaattttcatcctgtgggtattcctgtaccagatttaccgcgctttccatgcaacgcgcggcgcgcgcatcatggtggggctgttcgcctgtttcctggccttggtggtgctggcctttttcttccagttgaacgtgatttcatggatcctgacgcgcattttcgcccccggcctggcgctggcgctggtggtgattttccagccggagctgcgtgtggggctggcgaagctgggcagccatccgttcttctcctccttcgccaagcttcagcgggttgactttctggacaatttctgcaaggcggtgagcaagctttccaaccagcggttcggcgccctgttcgcttttgagcgtagtatcagcatgaagcccattgaggattccggcgtgaagctggacgccattttttctccggaactggctctgacgattttccataccaagaccgccctgcacgacggaggcgtggtgatttccggcgaccgcatttccgcggcggcctgcgtgttcccggtttcccagaaggagatgagcgaccgtaccctggggctgcgccaccgggcgggcgtgggcatgtccgaggagagcgactgcgtggtggtggtggtgtccgaggaaacgggggcgattgccctggccgtggggggcaagctggaacgcaacctgacgccggaacagttgaagggccgccttgaagagctattgaatatttctccttccaatgaaaaaactgctattgcttaactggccggccaagctgttctgcctggtgctggctgtgatcatctggtcttttatcaatcactgggtgaccacgaacgacggcgtgccctcccgtgggcagcttgaggagatcagaagatcccatccctgaagatttaccgttatgaggaatttcattgttaccggaaccgatacggaagtcggtaagacttatgtaagctgcctgatcgtcaaggccctgagagaagcgggcatcaatgccgccgggttcaagcccgtggcctgcggagacaggcaggatgcccgtcttctgcgcgaggcaggaccggaggggctgacgctggacgagctgaatcccgttttcctgaagaacgccacctgcccttatgtggcggcccggctggagaatacgcaggtggatgaaggagccatccgccgcgcctatgacgccctggccgccgcgcatgaatgcgtgctggtggaaggtgtggggggatgggaagtcccgataggccccggccggaatttcagcgacgtggccgcggatttcaagctgcccgtgctgctggtgatcggcaacaagctgggggccatcaatcatgccctgctgacgctgaatgcggtcaaggcgcgcggcctggaatgcctgggcattgtgtttaataacgtgaaggatgaatgggatacggcctgcgtgacgaacaggagcatggtggaggagttttccgacgcgcccattctcggcgagctgatccatgggcaggattccatggacattgacgccttgatggaacgcctgcgctgagcacggtagcagtttgacggatggaagaagatggggggaagaagctctttcctccccgttcgtttcagggtgtgaactggcggcgtagaggaaccggcatgtagtgttaaaagaccaggggagagggacaggttttcagctccggaagtcctgttttgacaggaattgagacgggagggcgtaaataaggaatgtttttgtccagagttttcagcattcctgtacggttttttattgccctgctggtttgtttcccgtgggagctgctggcaggggaggtggtaactgcgcctgtgccggagttttcctcccctgcgctgattccctatccttccaaagtagtctggggtaagggcggggcgcgttttaaaagcgttcatgtacatttgggccgggatgttccccgcagagatgacctggtgagggaaatgaaggatgtattcaggatgtccggcattccggctgccgtgagcaaggatgtttttgaggaaggttccctgacatgggagttaagcctggacgccggaattgagggagaagcgtatgtcctgtccgtcacgccggaaaagacaactgtcagggcagggggctttggcggttttttcaatgccctgcaaacgctgcggcagctggtttccaaagagaaggaaggttttttcatgccgtccgtgcagatcagtgacgaacccgccttcgccctgcggggtatgatgctggacgtggggcgctattacatgtctcccgcgtttatcaaggagctgatgcgccgggtttcccgctacaagatcaatacgctgcatttgcatttgacggatgatcctgcgtggaggctggaggtgaagaagtatccggctttgacagaccgcgcctttcactggaagtcacggttgccgggcaaattttatacgcaggaacagttgaaggacctgacggattattgcgcccggctgaatatccaggtgattccggagatcgacatgccggggcacagccagccgttcgccaaggccatgaagaccggcatgcagacggagaagggcgtttccatattgaaggatgtcgtggacgagaccgttgccctgtttccaggaaggttttttcacatggggtccgacgaggtgcacattacgatgaaggattttattccgcgcatggcggagtatatccgcgggaagggcaaggaggtgatcgtgtggtcgccgggcggcccgcacgataaggattccgtgctgatgtgctggggcgagagcgaggccggagcccggatggacaagggaatgaagcgcattgacagcaatggcttttacattgactgggctgattcccagtccggcgtataccaggtgtttttccagcagccctgcgaggtgccgcagggggatgagaaggcgttgggagccatcatgcccgtgtggtgcgacgggaacctgagcagtgagaagagggtgctggaacagtatcccctttacccctgcgtactgacgtttgcggagcgcgtctggcgcgggagcgccaccaagcggaaggattacatggcgcagctccctcccaggggaacagccggatgggcggagttccgggagtttgaacaacggctggcttcccaccgtgaccggtttttccgggacgttccctttgcgtacgtgaagcaggcggatatggcctggagcctgatagggccattcgaccaccgggggaagaatgacacgtcctttgaaccggagcggaagattgcgccttcctaccgggacggggacaggacgctggagtggaagaagacgcccgtttacggtggagccgtgcatatcaggcacctttttgcgatgttcaatatgcaccggaaccagtaccggctggaccactggcccacgctgatgtcgggggacgtgggaaagggcagcggaacctgctatgcgctgacttccatccgcagcccgaaggatcaggaagtgtggctgatggttggcctgaacggcatgtgggggcattcaggcgggtaccgcagtgcccgtgctccggagcaggggagctgggatttttccggcggggacgtgtggctgaacggaaagcgcgtgaatccgcccaggtggccgttcaagagcctgccctggacggattgggggaaaggccgcattgaagaagcccccctgacctgggaggggtatttcttccgtccccccgtgaaggtgaagctccgcaagggattgaaccgcgtactgatacgcagcgtgttcggccactggaagggggacaacgggcagagaagctggtttttctgctgtattcccgtcctgtgggatggtgtccattaccgggaggttccgggcctggaatatgatccccgcccggacgcccgctgacaggcaggcttcctgccgtcactctttttcaaaggcggagaggatggcctcatgcacgtcctgcgcggaacggatttccggcagggatgccgggccgatgaatacgggctgctggtttgcgggtacccggtccctgccatgggagcctttcacctggtctccgttgaggggaatgattttcatcagtgcgcggaagcccagcttttttttcagcaggaaggcggcggcgtggaacatggggaaggagagggtcgggtcaaagaacatttccgccggatcgtagccgggcttgcgatggatgtctacgcagcgggcgaagtccggggccctggcgtcgtccagccagtagtagtaggtgaaccacgcatccggggccgcgacggcagtgaagtccggcaggcgttcctgcgccgcaggattcaggccggagaagtccgtttccctggtttcctccactccgggggtggcggcgagcagcgttttcacctcttccttcacggaagggtcgttgatgtaaatatgggctgtctgatggtccgccacagcaaaggcccgggaggcgccgcagtccagcatttccgtacccatttccggtttgacggcgatccagccccgttcacggaagaggcggttgagggcaatgctgcgggagacgtcggaaatgccgtattcactgaggataacgggggtgacgccttcctgttccagaaagtcgaccaggtcgcagagcaaaccgtccatggcttccgccgcccgggccgcctgcattgaggaagggccagatttctgaaggtcatagtccaggtagggcaggtagatgaggttgagggcagggcggtgtttccgttccacccaccgggcggagtccgctatccatcgggaggactggatgccggccatggggccccagaaggtggggaaggggaattcccccaggtcttttttaatggtctcccggagttccatgggctgggtgtagatgtcgaagaccttgcggccgtccgccgggtacatggggcgcggcgtgatggtccagtccgccgtggagtacatgttgtaccaccagaagagcttggcgcaggtgaagccgggtccgtaccgttcccgcagcttttcccagaggcgcggtccctgcaccagtttgttggattgcttccagaactggatttcactcatgttccggttgtaccatccgttgccggggatggcgtgctcccgcggggaaagccccgtcacataagtactctgcgcggagcaggtgagggccggaaaggcaggggggaaggaggaaacgcgcctcccctccgcccaggcggagagtcgcggcatgtgttccatcatctggcgggaaagggccaccacgtcaatgacggccacacgggtgtgagggagtttcatggaagggatattagcggtttgatgcgggaattccatctttccatttgaaaaaaatggcggcatccgtcatgattccccgcatggaacgtcaggataaacgacttgtggaccagttgcgcccgatcagctttgaaacggggattgccccgaatgccacggcctccgtgctggtggccttcggccgcaccaaggtgatttgcgccgttacgattgaggaggatgtcccccgctggatgaaggttcagcgtgtggagggcggctggctgacggcggagtattccatgctcccctattccacgcttgaccgcaagcggcgcgatattacggcagggaagctggacggacgttccagcgaaatccagcgcctgataggccgctccctgagggctgccgtggacctgggcaagatcgggcagcgcacgatctgggtggactgcgatgttttgcaggcggacgggggcacccggaccgcttccatcaccggggcttccgtggccctggccattgccgtgaacaagctggtggcgcaaggcaagctggcggagtctcccatgaagaggctggtttccgccgtttccgtggggatgctgggcggggaagccctgctggacctttgctatgtggaggacaaggatgcggaggtggatatgaacctggtgatgacggaccgcggtgagtttgtggaagtgcagggctccggggaggaggccgtgtttacggcggaccagatgagccggatgctggaactgggccgcaagggcctggaagagattgccgggcttcagcgccaggtgatcgccgatgcggacaagccggacgccgacgcgctggaagggctgagcgcctttttcggcagcggcaggcaggcatggatttcccatggcgcgggattgttccggctccccgcaaacgggggggccggaggaatcccggcgcccttccaggcccaacatttttatgagaatatgcttgtcctgactgggaaatcacgttaatagtagagacgaacatagataaccacgtacggttttcttaaactgtaaacattccatcatatccaacaatgaaagtatcttttgcaacacgccagttacgcagggggttcaccctgatcgaacttttggttgttattgccattatcgccctgctggcttccgtggcgtacggtccgattctgaaccagatcaacaagggcgaccagatgcaggccctgaccaacatgaagaacgtgggtgtggcgatgaacgagttcaagtccaacagcaagctgggcaacttccccgatgacatcaccgcggaccgcgtggtggcgcagcacaattacatgagcggcctgggcgcgctccagggggatacctccaatgactacttccgccagcttctgggcaatgagtccgtttccgaaagcaacttctacgccaaagtgcagactccttccggcggttccaccgttactcccgacggtgaaatctatgacggcaaggccctgacccccggtgaagtgggcttctcctacgtcatgcgcaagggtgacaataacaagaaggtaggcattggcagctccgtgggtgaatatcccctgatggttacttccgtgctccccggtgaagacggcagcaccgtcgtggctggcaacgccgtccgctttgacccggaaagcttccgcggcaaggttctgattttcacgaccgcccagagcgccaagactctggaactggatgacaacgacaaccttcaggacaccttcattcccaagagaaggggcaaggatgtcagtgaccagttcctgattctcacgcctgatttcagcggccaggaataagttttttccgttagcatgatttgcacagggcgcatccttagggatgcgtcctttttcatgccccttcactggaatctggagcattccgaaccgccggtccgcaccgtatgacagaaatggccggcccggtaaaaagaggcagcggccacggttggcccgggaacaaggagtaaaaaacgttgttggatttccccatggttgtttggattgcatttgattagctattttttatatctgccgccggatagccgcatgatggggcagcggaaaggcgcggcccgtgagctattgtcatttatgggtcatccgttgtgcgctacggagtggtcatggtttcaatacacttatcatgaccaagattgtgattgccctgttatccttagcggcgccactggcatgcgccgccctgccttccggttcaccctccggagctgccacccctggtgaggagaaggtggttcaaatgaagggcgtcatgtccttgtctcccgctatggtcaaggagatcaatgaaggcggagccctgactatttcctccccctcttttccttccggttattataccgtgtaccgttttgtttcctcccgcgggaatgtagtgcaggctttttccgtgttggagaggaaccagctccaggcccttgggatggctcttcccgtgcaggtaaaggcccgggaagagctggatgaagacgtatcctggaagctggaacgggaagtggtagccatgttttcctatggaagatcctatatgccccattgtgaggaagtcctggtgcgggaggccgtgtacggccccttgtccggcgcgatggtttcccatggcggcggcggaggattttacggagggcctcccggcaggggaaacgggtttgccgccaaccagcttaaaccaagtcttccggataatgaggccagctccaagccgtcagacgacaaggatacgcctgtttctccggacaggaagcccgacggagggacagaggcggccggagatgaggctgtggctgattccgggaaggaagagctttctctggattccctgcttactgaaaatacggtgccgacgtcttctcccgatcccaagacgctgcgtttgccggcgtctctggaggcggaggccgttccggaaccgtcttccgccatgctgggcatgttcggcatcgcctgcctgctgatgcggcgcaagcggagttgaactccggtcccgttctccattccggttttccagccgggaaggaatggtttttcttttctacgccggaacatggtttgcaaacaggcagtgtcatgagaaaggcgttccggcctgaaaaagccggaacgccttcatgcagctaagtgaatggattttatttgcctgcgggcgtgccgaagacgttgatttccgcagcagaagcgctgttgccgtccagcgagttcgtgccggtgaagcggaagtagcgtacgggttccttgacgttcttgaggttgacggattgctcgatgggattggcgcggaggttggagaattccccttccgccgccttcgtccaggtttttccgtccgggctcacttcaaactggtatttgtccgtcattccggaggtttttccatcctgcctgggcaggtaggagaagctggagacctggtagggtttgcccatatccaccacaaaggattggggcgcctcagccttggcgaaccaggaggtttccggattgtcgtcaatggccgccgcagcgtttccggaagtggcgtttttcaccttccacccggttttgctgatgccgaatttggcctggctgacgggacccagcttgccgttggagaattggcagcgagccttgacagtgccgctttccgcaaatttggcgccctggctatagacgggggagccttccttgggttcgctgccgtccgtcgtgtacaggattttgttcttgccgtccgcaaggatgatgaggttgtctccgcggcggaagatggagggccgcacggcgcctgccggctggcggaagagggagaattcagagatgcagggcgtggcctggctgcccgtgatgcgcaggcgcagcttctgggcggtgatggggcggttcaaacgccgcatgacctggttgccgatggtctttccttcattgtcgatgcagacccatttgccgttgatgaaggcgtcaatgttgaaggagtccacacgctgacccaggcggatctgttcgcgcagccggatgacgtcgaaggtggcgggtttgggcagcgtaatgaaggcggtgggcgtcaggttgtcgtcctccacggcccagtaggtttccatgttgccgtccgtcatgttggagggggcgaattttttgtcattgccgcgcgtctggctggccgtgacggtggcgcccagggcatagtccctggcatacagcttgtcgcgcagttccttgaattccatcagggatttaacgtccgcagggtccagtttgccggttttgtccgccgccacgttgaggatgaggttggctccgcgtcccacggagtcaaaccatacctgcatgagttcttccggggatttgacgcgggaagcctgcccctggtgccagaaccagccggaatggttgatggtggtgtccccttccgccggcacccagcgttctccgccgcgcttgccggttcctccgcctccgccgttcagccccacggtgctccaatgggggtagttgacgtggcccttttcagagccgccccagcgggcgtctccgtagtggcccgcgccccagatgatgcagttgggctggattttgcggatcatctccacgattttttcaaagttgtagtacttttccgcgtcgccgatgttgcgcttttccttggcccctccgtagtagccgtcccccccgttggcgccgtcaaaccagatttcaaagacggggccgtagttggtcagcagttcgcggatttgcttgtagtaaacgtccagatagccttccttgccgtagtccgcattgttgcggtcccagggactgaggtaggtgccgaatttaatgccgtgctttttgcaggccagggcgaattccttgaccacgtctcccttgccgtttttccacgggcttttggtgatgttgtggtccgtggacttggtgggccacgcgcagaagccgtcgtggtgcttggccgtatagatcattcctttcatgccgcccttcttgaaggtggaaacgatgtcggaggcattgaagtccgtagggttgaagattttcggattttcgtcgccatagccccattccctgcccgtgaaggtattcaggccaaagtggatgaagccgtagaattccatgcgctgccagttgacttgggagggggttggcaccgccccgtagggcttgggagggtctgcggcccagccgggcagcattgaagaagagagaaccgttccgaggaagagggaggcaagcttgttcatgcagaaaaaacgtgtgttgaaaaatacggggaatgttctacccttctttcatacgggggcttggctgtcaagttgaaagggagggtggaaggggaacgaagggggttagcaggctctaacttcgacatgcggggaattccgcttgatacgggaccggggtccgtttagcatacagaggacttttgttcccatgtcctatttccgttttttactgctggcgctggttcttctgaccggttccgcgtttatcagcgagagcgcccccgtttacatggcccggcgggacagcaagttcgcgctcgtccctctttgcgacggttttgattttccggtaggcaagcctgacggcaacggctattaccggtcccgcggcctgcgcgtgaaaagcccccgccacatgggcgaggactggaacggcaacagcgggggcaattccgatctgggtgatcccgtttattccgtgggccacggcgtggtgacttacgcggcggatgcccgcggcgcgtggggaaaggtggtgattgtccgccatgccttccgcgagcccaagtccggaaaggttctttgttgccagacgctttacgcccatttgaatgatattaacgtcgtgctggggcagttggtgcttcgcggcacccaggtgggcaccatcggcacgaaccgcggcatgtatccggcccaccttcatattgaactgcattacaatccggacgtgaattgcggccagcagggtattcccaagacggagcgcaattacggccgcctgacggatttcatcacccgcttccgccgcctgcctctggaaaagaggatggtgcgcgtgcccatcggcgggttcctgccttacaagggcacggaaggactttgattttttgacggatgacggacggtgaagctgtgcattttcggcggttcgtttgatcccgtgcatgaagggcacgttcgtgtggctgcgcatgcgcgtgagtactgcgggctggaccgtgtgctgttcatgccgtgctccctgtctccgctgaaggagcaggcccccgccgtgacggatgaccagcgttgccggatgattgatctggcgcttcagggactggattgggccgtgcttgaccggacggatttgaatcttccgccgccttcgtggtcttggagggtggcggagtgcgcagcggaccgttatcccggcgcggagctgttctggctgatgggcaaggaccagtgggattccctggaacagtggggccgctgggagcacctggccgggctggtgacgttcctcgtgtaccaccgcggcggtgaaccggcgcccagggaaggggtgcgcgccgtttttattgagggggatgagcccgcttcttccacccgtgtgcggcatgatctgcgtacgggcgtatgccccgtgcctcatttgaatccggaggtggagagcctgatcaggcgggaaggcctgtacggcgcggcgcgcagctaggggggagcagcctgttttgcctcattcctgcttgtttccgggggcttcctccgcgtagtggacctgcatcagcgtgagcccgtccggcggggcgcagaacgggcttttatcatccgggcgtgggtaattaatgaggcgcgccagttcgtccagcgtgatttttccccgagcggcttcatgggcggctcctgccatgaggcgcaccattttatagagaaagcccgttccggtgagggtgatgaagacatgttccccctcctgcaccacctgcgcctgcgtgatggtgcggaggaagtagtccgccgggatggggcgcggttcattgccgcgcagggccgcaaaggccgtaaagtcatgcgttcccagaaagagccggacggcttgctccagaatgtccgtgctccaggccagtggacggtgccaggccagcccggcgtcaaaagggctgaggacaggcgcacgggagatgcagtagcggtaggtttttctcgccgcgctgaaccgggcgtgaaagcctgggggaacgtattccgcatgggtgatccgtatggtccggggcaggcgggtattgagggcggtgggccatttgtccgcaggaatgcggtgggtgtccggcgcatccacatggaagacctggcccagcgcatgcacgccggcatccgtcctgccggagccgtggatgcggacggcggagccgaagagggcggaaaaggcgcgttccagggcgtcctgtacggtgcggccccccggctggctctgccagcccaggtaggggcgtccatcgtacgcggtggtgaaacggatgcggggcatggggccgattgtgttggaacgggccggttttggcaagcggcaagtaccgtgcggtgacggtttggaatggatgccgtgcgttccgtccgctccctagcttggaggccataaaaagatggctatacgaatacaggattttggaatgctgcatgtggctccggatttgtccggcgtgattccgttgaacgcgtttgaagcgcaggccgccggagtgcggaacctggctgcgggcgcgatggatttggcaggaacggcgggtgccgcgctgaaggagatgcaggaggtgagggatgccgggcagtgggcgcaggcccgcgacggcctgtaccgctttgaacaggacgtgatgcgggagctggaggccggcggggagccggaccgccttcaggagaagtggaagaaggctttggcggaacggcttcccgcctacctgccgggccggatgtccgccccggtgagggagcgcgtggagctggcgagggagaatctggagactgccggaagcatttatttgcagaagatgtcccggctgggccagttggaggaggctcggcggtcctgggccggaggggtggagtccgccgtagagcagggggaggattccctggccgaacgcaggattgaagaaggccgcggcgtgtttgtgaccggagatgaagcctcccgcatggcggaggaagcccgtgcccgtgtggcgctgaaccgggcggtggaggaggttcgccgtgatccggccgcggcagtgcgcctagtttcccgggagcgggaaatgcctcagaccccggaggaaagaagagtggcgcaagaggcttctgcggcatatggagagctgaagcggcgttatgcggatgctgtggcggctaccgtatccggcggcggcctgctgcgggatgacgggctggcgaatgcggagaagcacggcttgatcagttccgaacagttgaggcgttatacggcttccagggactggaggcaggcggcggagttttccggcgtcagcattccgggagacgacatgctgctgtgccgcatggcttccctgattgatgaggattgcggaggagagggggatgcggacgccatgattgaagtggctacttccggcctgcctgcgccgcaggtggaaagactcctccggcggcgggaggtgatgatgaatgttcccctggagctgcgccgtgcggcttcccgccgcctgtcctccatgttccggaacggagcctggggaccgccggaggacgcccgtgcggtggaggaatggaaacgcgtccagatggagttggcggaggccgtgcagaggtctccggaacagccggcggaggagatggagaaagtttttgagaaggaaaaccgcctccaggatgcaggctgggtaggttttacggatatgaatatgaataacggaaaggaaggcaagtgatgatggaagatgagaggaaccaggaacaggacgggacatttttagtagaagaaggcgtgccggaaaaggcctccgcaacgatggaggaaaaccggttgcaggaggagaacgcggtatccgcagtcccttccggcgcgggagaattcccggaacaggtggcggcggcgaaggaagagtactggaacagcgtgctgacgggagatgtgatgaccattccccgggaggtcaggcagaaggcggaagcgatgtatccggcgggaacggctgaccgggaaaggattgccgcgtgcgtgatgcagtcatgggtggcggattcgggggaaatcccccgcgaacgcatccggagggactggaagagtatccgggaagaggtggcgcggcagtatggagcgtccggcaaatctgatgacgaattgtttgtggccgtctccatgcacaaccaggtgcgcctttcccagcgggagaccttgtttgaattgtaccaggaggagtatgaccgcacgctggccgggagtggaacggctccggacgaacggaggaaagaggctgtttccgcgtggccggaggagatgcaggccgtggcggaccagttgaagagcagggccgtgtccgacgccctggatgacaggaaccgtctggcggacgccgccggaattatccgcagggggctggaagggctggtagccagtgaggccccggcgccggaaggtttttccgctgtgcaggtgaaccggaaggcggttgccggagttccggacgtcattcgcgccgtggattgcctggcgtccctggaggacggggaccggcggaaggtgttccgcatgatggccccctacctgcgttcccggcccgctttccgggatgccctggggggcgcgctgaaacgcggagcagcggaagcagcggaaaatgtggctcatctggccgtgaacggtgcggcctgggccctcccggaaggccgggagaaggaggcgttggacaggtattcccggagttttgaggaactgcgggattttgccaggatggagtttgctcccctgcgcggaggaaaggatgccccctggttccgggagatgctggtggacatggcccagcagggcgcatccacggcgctggcgttcagcggcccggccgggctgggactgctgatggccggggagacgggccgccacatggcggatgcccggcgcatgaatccggacggcgtgtttgatgcccagatgggtggcgcggtcgtgtccggggggatgaacaccctgctttccttcgggatgacgaagctgggccagcggatgctggggcaggggatgcgcgcgttccgggccatgaggtccgcttccgggaatgtgggagcggttctttccggaacgggagccatggcggcggatgccgtgaagatggcggcggagaacaagctgatggagctgacgcccatggtggcccaggaaggcgtgggagcgttgacggacagggtgtccggcgtggactgggagggatggaaggagcggcagatgtccgtggacgaccagttgagggaggcggccatgatgatgccgttcctgctgatcggcgcgggaaaggcttccctgcaccatttccgccatgccggaaccttgctgggggacggagaacctctgaaggtgtttggcattccggatgaagcggtaacccgcatcctgcgggagaaggacatgcgccgtgccggggagctgctgcagaagtccctgcgtgattctcccctgtggggatccctgtacatttccagaaaggcgctggaatggtcccgcgcgctggatgaagccggggagccttttttaaggacggaacaggacgtgagggattttctggaactgccttctcccgtgcgcacgaagccctggaagatgagggattttccggagtcggaagcagtgttgaaaaaactttttccccatccggaccatgcggcggccaggaccaagtggctgttgcgggccgggctgccccgcgtgggagagtccgccgcggcggacggccgccgcgtttatgaggcggagccggcccccggcatggagatgaagagaacccggggccggagttcggtagaagaggccctttcctcctggtatgaagccctgtgccgtatggaagaggaagatctggggctggccaggaacaggaacgggagggagattccgtggcgtttgaggaatgcggcggattacgacgtgcaggcggacgccctgcgccgcgcgtttgtggaagacaggctgaagaagcgcgcctaccgcccgtacaggatgctgctgctggcttatccggaggaagcggggcgtagcggtttttccggcagggactgggacgccgtcaccgtggaaatggagcgccggacgcgcgccaatgtttacgagggagtgatggaacgggtgcacggcgcttcccatgaggaggtgtccgggcatgtggcccttcgcctgtgggagtcgttttgccgtgatgagggttcctgtgccagggcgcgccgctggctggaggaagggagctccctgatgaacgctccggatttgctggccggggcttccggcccggacggcctggccgccgccctgtccaggatgagcggcatgatggcttccctgggggaccgggaacgccaccgggtaagcccggagctgcgggagatgaaccgcatggtatggggaacccaggcggatgtgaacagcttgtaccaggtgcttcccaatatgaaggagtttgacgtgcatgtagggcgcggctacacgccggtggagagttacgggcggctgctgtcccgttttctggaagtggaaccggaacacgtggcccgttatgccaccgtgctggatgcgccgcggctgcatgccggtccggagcgggcggttccgcgcgtttatccgggtacgcagaaagcggtggaaaatctttcccgcctgactccgcgcctattccagtcctcgcgtgggagcggaggcggggaaaggctgtggcgggtaaaatatcccaatggcaggtggtcggcctggcatccttcgcaggaggcggcgggagcggacctgatggccaatgtctccatgatgttttcccccgcctgcacggccaagagggatttgatccggagctgggaatggcacgcccgcagcgggcatccggaatgggataccaattatctgcggctgaccgcaggactggaaaacgtgcagggggaaaggctttcctgcctgtatgacagcctgacggccatggcggtggcggatatgctgaaggccggttacggcgtgcggggcgccgtgggttcaggggaccgtctggaggtgacgggcaggggccgcgtggccgctgaaacgctgatgagccatgacgccctgcgggaacgcatggatatccacggcaagtacgtgggggacgtgcagcggctgggagtggatgcggacaatcagcccgttccctcggccaagggactggtgatgcaccggctgcggctccataatacggagaatcccctggccttgattgaggacaaggcggaggtcgtatgggaccggctgatgcgcacggaccagctttccccggaggacgcgtgggagatcctgaaacgtctgggccgcgtgccgcgccgcagggcacttcccggagaaacggaattgattgaagagctttcccagctctccaaggagtatttttttgcccatctggaccatgacgccgtgccggagacggtagcttcctgggcgcgctacggggccgcaagcccggacaaggccctggaacctctggaggaattggtgcgccgcgccgggctgctgaagaaaacgctgaaggaggggccggaaaccgccgaattcatgggcatgctccgtgaaacggtgggaatgaatgaccggatacgggctgaacgcgcctgggacgcaggcggtgaggaggtgcgccttcccatgatggaaaggtacgcccatagcctgatgaccggcaggctgctgtccaccgcgccggaccacgtgagggaggacctgctgcgttctctggccgcgctggacggatatgggggcgggtccgtccgcaggatggaacggctggcggaacaccgcatgacggaactggcacgggcgcttcaggagtttccccagttgaatgcatggcgtccggacccggagcatcccggcctgtacctgcatttggtaaagcggccgttcaaggccgggaagggaaccctgcgcgcgaaggatgtttctctggaagccatgggagaactcctgccggaacctgttctggaggcccccctgtatatggaggaggatttttccgtcaggagcggcgttcctgcccctgccgcatggcgcagccgtccggaggtaatccgtgcggtggaaacgctggacgtggtgaggcgggattttgcagcccggccggaagccgcggagtccggcatcatctggcaaggaagaacctaccggattgattccgggacggcccccgaaggggtggcaacggcctggagccgggaacttcccctggatgaagccgcttccctgattgatgttctggaccgcaggcaggaggaaatgagagggggcatgctccccttcctgcctgatccggaggaggcgcgcgcgatgtacgccaactgcgtgatttaccgtgacccggacgacccggggcataccgttcgcctgatgccgggcattccggaaagccccgtacggcaggcgcgcgctccgtatgtggtgcatgcgtggaacggcgtttacctggacagccggggtctgcctgcggcgtctgagcgggattcctatattccgctggagcgcttcacaggcgcgggagaggagccttctccggaaaccgctcgggagagccgcgcccggtccctgggccggattctggaaacgctgggagatgcggatgcgcaggaacgctggtggtggaacagggagcaggccgttgggtgcttcatggaagacgtcgtcaggctgtatgaagagctgggggtacgctcaggctatctgaggggggagcttgacctgcttgatcccgtgatggttcaggctctgcgcttcgtctcccacgtgctgaacgatcccctggcctaccgcctgcccctggacaaggggacggaggccctgaagggaatgaccagggagggagtcctgctgaaagaactggtggaggaacatggaaacttctaatcatctgacggaatcctggagccagccttggcagtctgtcctgtccagccagctctggaggctggagcacctgtactggatagaaaacaaggccgggcagctccagcgcttctccctgaacagggcgcagcggcggctgcatgagcggctgtggtacaggaacgacatcctgaaggcgcgccaactgggcatttccacgtatgtggccatgctgatgctggacatgagcctgttccggtctaatttccattgcggcattattgacaagagcctgccggacgcccagcagaagcttgccaagctgcgtttcgcctgggaccatctggattacgtgccgcccgacccttccgcgatggatgtggccctggcccggctgggagagagaatcaagagcctgtccggcgtggagaagaagggggaatggcggccctgcacgtctgcgcgcaaccgcttggctttcgccaacgggagcgacgtgcgcgtggggacgaacctgcgcgggggcaccatgcagttcctgcacgtttccgagctggcgcatgtttccgtgcacgccccgtggcgtgccagggaaatccgcacgggggcgatcaatacggtgccccccggcggctttatcctgaaggagagcacccatgagggcggccggtacggcgtgaattacgaactgacgcgccaagccatggagaacatgggcaagagcgagctttctcccctggatttccggttcttcttctttagctggtttgaccaggaggagtacacgttgccggggcgcggcagatggagccgggaactggacgagtactttctttccctggaacgggaaaccggagtggcgctggatgcgggccagaaaaggtggtacgcccggatggcccgcgtgatgggggcggccatgaagcaggagtacccgggaacgccgcaggaagctttctccaccggggaggaggggagcatttacggcagccgcatcatggccctgcgggaacgcgggcgcgtggggacggagtttgcggcggacccggacgcccccaccttcacggcgtgggacctggggttgagcgatcatacggccatctggcttgtgcaggtgatgggggacagcttccactggctggaccattacgccgccaaccagcagcccctggcccattatgtggaaaaaatgaaggaatgggagaaggcgcacggcgtggcggtaacggcccatctgctgccccacgacgccgcgcggagggatgcccacggcatttcctacgtggagaacatggcacgtctgggattggcgaacgtgcgcgtcgttcccaggaccacggacgtctggcgcggcatcaatacgctgcgggaactgctggagcgcagcttcttccatgcccgcacccaggaaagggtgcgcggcgtgcgcggagaggaggagcccggcggcgtggaacatctggaattgtacaggtccaggccgccgggtgcgggcggttccttggtggagagccccgtgcatgacggacattcccatacggcggatgccgcgcgcacatttgcggaggcgtggtcccatggactgctccacgggcccgggaatgaccggggccgcggcaggcgcgcacggatgtggtgatggaaggaaaacggggccgggaagagatttttttgattgatggttgacagttttgtcaaaaagcggttcctttttccggctttccgttgtctaacgcagtgatgcgactccccgagatgaagttaccccttttccatctgctggttccctgcctgtgcgttccgttcctgttttcctcctgcggcaccacgggtgggggctcttccccttcttcctcttccaatgttccggtggaggaaatgaccgggtattttgaggaaagcggaaccattccgggacacctgctcaaatgggaggacgatccgtccctgcccggaaagctcctggtcgtggtggacaagaagaagcagatgatgtacgtgtaccgcgggacgcaccgcatcgcgtatgcgcccatcagttccggaaggagttccggcatgacgccctccggctatttccgcatcgcctccaaggatgcggaccaccattcctattacggcgcgttcatcaatgccgccggggagctgcgggacggggatatacggaaggatgccgcacggcccggagaaaggtttgaaccggccaagatgccctatttcatgagggtgaacggggctgtaggcattcatgaggggtacctgcccggccgcccgtcctcccacgggtgcatccgcatcccccatctggtggcgaagaacctgtttgaagtggctcccgtgggaacccgcgtgattgtcagggacggggactggaatattcacgagcttcagaaaaagccgtccggtattttcagaacggtgcataagccgtccgccccgcgggctggcgcaaattcagcttcctccgggaagaaggagcttgtaaagtcagaggcgtccgtggagaaggatgccgctgccatgccgcctgttggagaacaggaaaacgcgccgctgccttcttccagcgcggacgccgtgaccccctcttcatcccatggcctcgaaggactggaataacatgctgtccgggcgtttataccatgcccaggattccgaattgacagctaggcgtcttcgggcgcgcaagctcgtcttccgctacaaccagtctgccccggaggaggaagaactgcgccgggaattggcgcgggagctcttcggcgggatgggggaaaactgctatctggaacctccgctgcggtgtgactatggaacgaatatccggctgggggatcgcgtatatgtcaacttcaacctggtggtgctggactgcgccgccgtcacgatcggcagtgatgtgctgataggccccaatgtggggatttacaccgccacgcaccccgtggacccggggttgaggcgggacggtctggaatttgcgcttcccgtcaccattgaggacggggtgtggataggcggccatacggccattggcccgggcgtgcgcatcgggcgcaattccgtgataggcgcgggaagcgtggtgacgaaggacattcccgccaacgtggtggctgtgggaaacccctgccgcgtgatgcggtccattacggaaaaggaccgcgaggcctggggtgcggtggaaaatggtggggaggccgctaccgcaggaacggaggcaaattctcctgcatgatgaaatttgaattgcttttggggacggatggtgcatagttggtgccctcacagtgtcgattagccgctgccacgagctaaatacattcaaagaaaacacttatgagtaacgaaatcaatttgcaggaattcaagatgcatgaaaaggattccggtagctccagctaccagatcgcccacctgacccagcgcatcgcccacctgaccgaccacctgagcacgaacaagcacgatgtttcttcccgccgcgggttgttgaagatggtggctctgcgccgcaagcttcttgattacgtcaagcgtgaagatctggcccagtatcagagcctgattcagcgtcttggccttcgccgctaaacggcggagcatattcccgtttgattcggccgttgcggttttccgcagcggtcgttttttttgccgcgggggaagggcggttccccgtatttttgttccggaagaggccttgacctttaaaaaatgtctgttagcctgacagacatctatggaacaaatgacacgggtccagcagaacacgctgagaaaaatcgtggaggcggccattgaactgatgagtgaaaaagggttccaccgcgtcagcgttcaggaagtagggaaaaaggccggtatttgtgaaaagaccgtcttccgctactttgccaccaaaaagtccctgctggatgaaatcatccggtaccgggaatatgccagcgaactgaaaagggaattcgagaacaggaaaacgtgggacctggcgcatgacctgaaactggctgcgcgcctgtacttccaggcgacgaaggccaaaaggaacgccttccgggcctacttgagcgcgctggactccgtggatacgaacggagatgattttttgcgcgacccgcgggagcttcattccttcctgtgtgactacatgggcgccatgcaggaaaaaggaaaggtcagggagggggatgtggggctcatggtgcgcgcctttgtcaataccctgcacggctacatgctgatgtactgcctgaatgacgacagcaaggcatggcaggacaaggtggcctccatgaagctgaccattggcctgttcattcagggattttcccggcaatgcacatcctgcggcgcatgagcaagcatttgaaggctatatcactgggcagcatggccctggcggccgtgggagccatcggctggggagtctggcatttccgggagagccgtaccatgaaaacggacgactgccgcgtggaggcgagcatcgtttccgtgggatcaaagctggcggagcgcgtcaccagcgtggatgtggaggaaggggaaaccgtccgccgcgggcagacgcttgcccatctggacagccgcactatgcaggcgcgcctgatggccgcgcgttcccgcgtcaagctgatgcaggccaggcatgacgagatgctggccggcttccgccctcaggaaatcgagtcccagcgggccaggacggcccaggcctccgccagcctggaacatgcgcggcgtgattacgagcgcattgaaaagctggtgagggagcaggcaggcatcagctccgcggaccgggacgccgtacgggccacctacctggcggcgcaggcgctggagaaggcggagcaggagaatctggccctcaagttggaaggttaccgcgaggaggaaaaaagatccgcccaggcccagctggaagccgcacgggcggaactggaggagttggaagtgctgtgcggggaatgcgtagtcaaatcccccgtggacggcgtggtggcccgcaagctggtgaacggcggggagatggtcagttccggccagaagttgttttctattgtggacggcggggacatctggctcaacgtccgcgtggaggaaaccaagatagggcgcatccggcagggtcaggacgtgcagttcacgctggacggttatgacggcagggttttccacggcacggtttatgaaataggggcggccacctatgcgacattctccctgatttccacggagaacgtcagcggttacttcaccaaggtcatgcagcgctttcccgtcaaggtgagcctgccgaagccggaggacggagtagtattccgcccgggaatgcagggaaaggtttccattgatttttaaggaaaaagtatgagcggtccggttctgcaaacaatggttccggcgtggaagcgccgcctgctgacggggatggcctgcgcgtgcacgatgctgacgtttctgaatatgggctgcatcacggcggccacaccggatttgtcaggcacatttgtggtgggcaccctggatgtttcctggtcgggtgcggcgtgcccgctgggaactgccctctcctttaccgtggcggcgtatctgtgggcgcgcatcggactgagaaggtccctgcgcacggccctgctgatcatgctggccggaaccttgctgggactggcggcggaccatttcttcctcatgattgcggcccgcttccttcagggggcaggaggcggcctggcgctggtgtacggaacggggctggtgaatgccgccctgccgccggagcgccgcggcgtggcgatgggagtgaaactttgttccattggcctggcttcctgcgccagcccggtagtggggtgcctgctggtgcagtactggcactggcgggggctgttcgtcattgtgggcgcagcggcagccgttctggccgtgctgacgacgctgtatgttcccgaccagaagattcccaagggaggaaaattcgactggttttccttcctggcggtggggatgggatgcgtgtgcatgctgatggtgctcatttacggagagacggacggctggacggcgcccggcgtgctggcctggatgtacggcggattttgttcctttgccctggccttcatttcctgcatgacccaccgcacccctctgctggacgtccgcgtgctgggcaactggcggttcctgtgcggcctgctggcgtccctgtgcaacatcttctgcatttgctgggtgcgggtgggaacggtgcagttcatgcgcaatgtcatgaattatgaaccggtgggcattgcctatgtgttcatggttctggtggccggattttgcggcggcgcggcgctggtgctccccctgatgcagaagggcaggctggccctgcgggtgggcatgatggcggggctgctggcgctgggcgcctccgccttcttcctgtcccggctggacgcgggctgctcctggctggacgtggcgtggcccctggggctgttcggaatcggttatgccttctgtttgaatacggccacgccgcttgccctgagaggggtggaggggcgttccgccgccgcttcctcccggacgctgaacaccgtgcgctacatctttatttccctgtacgtcagcagtgtgagcacggtattggcccatatgaaaacggggttccgcttcagcctggcggaacaggtaagggacgattccccgggaacggcgcatacgcttgacatgtggcagaggcactttgcggaaaccggcggcacggcgcgggaaatccatgcatcagtggatgcggtgctgcaaaaggccgtggcgctccagagccaggtgttctccgtggataccttttatctttgcaccgtgatcgtgggggcggcgggagtcctgtttgccctgttctgcctgaaatccagcccggaaaggaaggccgcttcatgaaacgtctgatgcttcttctcatggccgcgctgctggcttcctgcggcagtcccgccgtatttgaaaggcccgtcatggaaatgccggagggaacggcccggacttctcccgtaggggccgggtggtggcgcattttcaatgaccgtgcgctggaccgtctggaagaaaaggccgtggctcataaccgcgatcttgtccgcgcgtccgccctggtggaccaggcctccgccctggcggcgcagacgggcgccgccatgctgccccgggcggaactggaagccggagccagcagcgaggaattgtccgaaggtgaacgctacatgaacaacctgccggaccgggcaagggatttgtggtccatgtccggcgtgctctcctatgaagtggacctgtggggaaagctgcgggcgcgcacggaagccgcccgggcggagctgctggcttcttccgccgcacgggatgcggtttatctgcggctgacggcggaggtggcctccgcctacatcaatgtgcgcacgtgggaggaaaaatgccttatcatccgccgcgtccacgcctcctatgaacagacctgcgccatgtatgaaaaaagatttgtgcaggggcagtacccggagcttgccctgcgccgcgtccaggcggagcgctccaaaacgctggcccagctcaggctgtcggaaaacgaactgtcccgtgctgaaagcgtgctgtccgtgctggtgggggacagtcccaggcaggtgatgaagggcggaaggcccggcgggggcaatgccgccctgctggcttctcctccggtcattccggcgcggctccctggtgacatgatcgaacgccgtccggatatctgggagctggaatcccggctgaaagccgccttttacggaagggaggcggcgcggaaggacaggttcccgtctctggtgctgacggggcagctggggcaggtcagcacccagttgaacgaactgctgaaccagtcttccagaaattatgaattgggagcgggcattctccagaccctgtttgacggaggacggaagcgcgccgccgtacgcgccgcggatgctgaatgcgccgccgtccaggccgcgtatgagcaggctgtcctgaacgctttccgggaaatcagggatgccctggtggaacgccgcaaaagcgcggaggtttacgaggccacgcttgatgaagtgaactgcctacgccgcagctgggacattgcgtccaggcagtatgaggccgggtatgtggggctgatggatgccctggatacgcacaggagcctgctgagcggggagctggacatggcggatgccgcgcagatgcggctgaatgccgtcgtcaaattctgcaaggctctcggcggcggatggcagcggcgccccggttcctcatgaggaacggctcttgccgccggggatgcccccatctgctccggaggaagttttccggcagggaagggaggggacgcccattcccggcaggtggcagggaaaagcacggaacagcggggctatcaaactatttgcttgcattctccttgacagggcttatgctggcatccgacgttcggggactcgtttcccggtgcgtttctgtcgggcatgccttgagaaattttcggattttcacaggctgtcaagccggtaagactgggccggagcgtttgatccatctgggatgtgcgccctgccgcgcggacagtgttccccttcatttctgggaaaaggctgctgcggataacactcttcctgaggcactgcccgtacctgacgccattcaggcttcccgcccggagccggtctgaatgggctgatgaggctgcgggtgactgaaagacaagaaatataatgagcatacattcagttgaatgcaacgttggtacgaatcccatcacgattgaaaccggaaaaatggcccgtctggcagacggcgcggttgtcgtccgcagcggcgataccgtcgttctcgtgaccgtggtgagcgccaccaaagtcaaggaaggccagaccttcttccccctgtccgtggaatacaaggaaaaggccgctgccgcgggcatgttccccggcggctacttcaagcgtgaaggccgccccacggaaaaggaaatcctgacgtgccgcatgacggaccgccccctgcgcccgatgttccccaagggctacttctatgatacgcaggtgattacccttctgctctccgccgacggtgaaaatgaaccggacattctgagcatcaacggcgcttccgccgcctgcgtcgtttccgacctcccctttgccgaacccgtgggcgccgtccgcgtgggccgcgttgacggccagttcatcatcaacccgaccaactcccagcgtgaaaacagccagcttgacctggtgtttgccgggacgaaggaccaggtgatcatgattgaaggttccgccaacgaactgccggaagaagacttcatcgccgccctgcgcctggctcaggaaaacgtgaaggttctttgtgaaaagcaggaagaactccgcgccgtctgcggcaaggaaaagcgttcctacgaactctgccttgccaagccggaactgctggaaatcggctatgaaatcgccggtgaccgcattgaagacgccatctatgccgcctccaaggtggaacggcagaagaaggtgggagccctgcgcgacgaagtggaagccgccatcaaggaacgccatccggaagctaccgattttgacgtggagcaggtctttgaatacattcagaagaaggccttccgcatctccatcatggacaaggacaagcgcgccgacggccgcgccctcaaggaactgcgccccctgaccgcggaaatcaacgtgctgccctccgtggtgcacggctccgcgatgttcgcacgcggtgaaaccatgtccctctgcctggcgacgctcgctccgatggaagaacgccagtacatggacaactacacgggcagcgtgaatgaaaagcgcttcatcctgcactacaatttcccgcccttctccgtgggcgataccggtcgtttcggcggtcagaaccgtcgtgaaatcggccatggcgccctggcggaacgttccatcgctccggttgtcccgagtgaacaggaattcccgtacgccatccgcatttcttctgaaatcatggaatccaacggttccacctccatggcttccgtctgcgcgggcacgatgtccctgctggcggccggcgtgcccctcaagcgccccgtggcgggcatttccgtgggcttggtgacggaacagaatgaccagcatgaaatcaccacgtacaagacccttctggacatcatcggttccgaagacttctacggtgacatggacttcaagctttgcggcacgtctgaaggcgtgacgggctaccagctggacctcaagctgcccggcatccccctctccattctggaagaagccatccacgtggcgaaggccggacgcacggacgtgctgaaagtcatgaatgacgccattgcggctccggcccagatgagcccgaatgccccccgcattgagaccaccaagattcccgccgaccgtattggcgagctgattggccccggcggcaagaacatcaaggccatccaggctgaatccggcgccgacatcaacattgaggaagacggcaccgtgcacatctacgcctccaagcaggaaggcctggaccgtgcgctggaactggtcacccgcatgttcaagaccattgaaatcggtgaactgtacaccggcaagatcgtttccacgaccacctttggcgcgttcatggaagtgcttcccggcaaggacggcctgattcacatctccgagctggccgaaggccgcaccgccaagacggaagacgtcgtcagcgtgggagacgtggtgactgccaagtgcatcggcatcgacgacaagggccgtgtgaagatgtccgtgcgcgccgctctgcgcgacgccaaggcagccgaagcggaagccgccggcatcacggaataacggtttttccattgagcctttaaacttccagccccgtttcccgtttgttccgggagcggggctgtttgattgtttaagggggggattgactgtaagaagggaagggctgttcgcgtgatcttccggatgtttttttgctgtttcagggaggagccgggaaaaatcaggcagccaaggagaacaggctgcggaagaaaccgggaggcggttttgtttttgcagcggtatgtttctggaccgcgggctggattcgtgcctgcgttattgccgttccttccgtaagaagatttttttgccgtacggcattcctgcgggacgtcagggatattcctttttctgcacggacgccgttttcacttcagcagaaggaggcgtgcacagaaagcggcccagcagatccagcgtggctttcacgtccttcaggtccgccagctcccggggagaatgcatgtagcggatggggggcccagaaaagcggcgtggccgccgtaaagcttgacggggacgaaattggccatgccgggcgggaaagcggcgtccttctggaacggaatcccgtgttcttccgccagttggagcagttgggcagtgataggctggtaaaaaattttgtcatgagtaaaaatgacggggccttcccccatggcctggcggctcaatcgctcgttttcttcacggggcggcaggtcgtccagctggacggtatccagcgtgcagtcaataacaatagccagtttgggacggttcctgccgcaatacgccgtggctcctgccagccctgtttcttcctgggaggaggaaaggagcgtgacgtggtatttcaggtcttttttgtgccgggacaggaaggaggccagctccatcagcatgaaggaattgaggcggcagtccaggccgtgggccatcaggcgcgtgccgtgcagcaattccggcttggtggagggaacgccgcgccggccgacgctcaagcccatttcccgtgcttcctccgcgctggatacccctgcgtcaaacaggatgtattcccctcctgccggaaggggctcgcggttcagccaccagccgggaaccgccccggcaaaggcggtgacggggccgtgttccccgtcaaaacggtaagggcaggaaagcatggactggaagtccggaaagccgacgggccttactttcagaaagccggacggagtgatgtctgcaatgacaacgcccacttcgtcggcatgggcgtctatcagcaattccggggcgtccgggtccgggctgcggaacgtagcccaggcattttgatgcgcgtccgtgccggaactgtccgccaggggcgccacgtgcttgagccagaattgctggaggggggcttccgctccggaagtggaggaaatgtccagcagggaagccagccgttccatggactgaccgctgaaaggcggctgcgtttccggcatggaggccacgcaaaggttgaaaagaagcagtggaagcagcaaaaagcggatagagggcattccccagcctatcatggaaggagggcgggaagcaatgctggaggaatgaagtgcgcggtccgcatggcagatttttttgtttcccgttcttgacaggatttttttggttcctatgatgcggatgcccgttgcgttttacggacacccccgccatacatgattctttttatcatcttcgttattcttttcctgattctggtcaacgccttttacgttgccgcagaatctgcagcggtgagcgtgcgccgcaacatgatccgggagatggcggaaggcggcagcaaggtggctgcccatttgctgaggattttggaaaacacgaaggaactggaccgctacattgcggcctgccagttcggcattaccatttccagcctgattctgggtgcgtacggccaggtggaactgtccgcctacctgctccccctgtttgaacggtttggcggcatggattccgtgatggccaattccgtagccgccattgtagtgctggtcgtcctgacggtcctgcaggtgattctgggggaactgatgcccaagtccctggcgctgcagtttcccaagcaggcggccctgtacacgtattaccccatgcgctggacgctgaccttcttcgcatggttcattgacttcctgaacggaagcggtcttctgctgcttaaactgttccgtctgccccccggaggccaccagcacatccactcccagcaggagatcaacatgctgctggatgaaagccaccagggcggcatgctggaggaggatgaacatgaacggctgcacagcgcgctttccctggcggaacgtacggtggagcagatcatgattccccgtttccagctcgtctgcctggatgtggacgctacccaggaggatattctgaacatgattgcggacaggccccatacccatattccggtgtatgaaggaaaccgggaggccgtcatcggcatgctgcacatcaaggacatggtggccgcgtatgcggaaaagggtgttttgcctcccctgcgctccatgctgcggcaggtgccgtgcgtgatggagatgcagacggtggagatgctgatgtcccgtctgcgggaggacaaggccaaggaagcctttgtgctggatgaatacggcaagttcgtggggctggtgacgctggaacggttgctgggtgaaatggtgggggatattgatgaggaattcatccgctccggggaaaaggtggaatacctgccggacggttccgtgcgcattcccggcatgatgcgcgcccataaggcggaatgcctggtgcccttcctgatgaacggcgccaccacagtgggcggctgcgtgatcaagcacatgtcctgcattccgaaggagggggaccgcctgattattgcggggcgcgtgctggtggtggaaaagatggaccacaaccgcgtttcctccatccttctgttgcctccggagaaaaaggaggatgaacctgccatggaaagcggggtggaatcatgatgacgatttttattattctgctgctgattgtactgaacggcctgtttgtggccgcggaatttgcgctgcttggcgcgccccgcgcggctcttgagcaaatgggggcgtccggcaacatggtggcgcgccgtgtttcccagatattgaaaacgccccgtttgcaggaccgctacattgccacggcccagctcggcatcacattcgccagtctggggctgggcatgtacggggagcatgccgtggccggatggctccacgaatggctggcccagtacggctgggcctcctggctggtggcgcatggcgcagccagcgttctgtccgtagcggtgctgacgtacctgcacatcgtgctcggggaaatggtgcccaaggctctttccctccagtacgccacgaagctctgcctcatcattacgatgcccatgtacgtgattcagctctgcctgtatccgctggtggtgggcatgaacaccctgggcaacttcttcctgaggctgctgggcgtggacaggaatgaatccaaatcccattaccattctgcggaagaacttcagtacatcattgaggaaagccatgaaaacggcgccctgccgcaggaatccggccgcatcatggacggcctgtttgacctggaagacctgtatgttcaccaggtcatgactccgcgcgtcaggatagacgccattccggaaagagctgggcatgagcagataagggaaatcgtgcgccgcacccgccgtacccgctaccctgtctaccgcggggacctggaccacgtggtgggcatggtgcatgcccgtgacctgttccgcatcatgctgcgcgggaaggccctgacgtccgaatacatccacgccattcccaaggtgcccaagacggtgaagtttgacaacgtggtggagatcatgaggaaggacaatgtgcgccttgccatcattctggacgagcatgggggaacctccggcctgctgaccctgacggacgtgttttccgaggtgatgggctgggaccgcggccgcatcagagtattgacagacctgccgcgggacgcggtgggcttctcctgcgacgtgtccggactcgcccgtattgaggagctgggggaagccatggacatggacttgcagagtgaagaaatcgatactgtgggcggcctgattctcaatctgctggaagctccggcggaggaaggggacactgtgggctaccgcggcctggaattcaaggtgacccggacggagaacggcggtgtggaacgctgcaccgtaacccggattactccactgatgcgggaggaagctctggaagaagaggaataatccgcggggctcaggcgggaatgcgccggaaccgcgttgctttgtgcaaaagttccttggtggagcgcgtatgatatggcagaatattttccgtcatgtcccaacctgagtccgccgatgcttccatgaaacgcccctccatgaaaaagtgggttgttctccttgttgttcttggggcgctgatcggggtaggcacgatgatgaaggcatggatggaccggcgttccggcgcggaggcccagcccgccgttttctcaggcggcagcgagcactgggaccagaatgaagttcccatctccatgcagtgcggggcttgccatgaaaaggaattccggcagtgggccggatcggatcacgcctgggcgttccgcaagctgggggaccagtgggaatctgaggcgttccataacatgaagctgaacgcccacggcagcattcttcaattctccacaaatgcagaggggcgcatggtgcatgacggccagtcctcaacctcctggcgcgcggactgggccacggggagaatccccctggtgcagtacctggttcccgccaaggacggcggttatcataccctgagcgccgcgtgggacgtgaaccgcaaggaatggtttgatatctttggcaaggatgcccggcaaccaggggactgggggcactggacgggccgcggcatgaactggaacacgcagtgcgcgtggtgccacatgtccctgttccataaaaattatgatccggtcaaggaccgctatgcctccacctggacggaacccggcgtgacttgcatccagtgccacggccccttgctggacaagccggaggaggggacgggatgcatgatttccaccagggacaagctgacgccgcagcagattcacgacaactgcgcttcctgccacgcccggcgggatgaattcgatcacgattttgccgttggcgaccgttttgacaaccatttccagctcgtgcttcccgtacagcccggcgttttctggcccaacggcatgcagagggatgaggattattgcgaaaccgggctgcgcctgagccgcatgggcaaggcgggcgtcacctgtctggactgccatgacccgcatacgggaacgctgaaacttccgcaggaggataacacgctctgcctgcggtgccacggcaccggggaggcggtaaacggcgtaaaagcccccgtcattgacatggccaggcatacgccgtgtccgcagtccagcatgggcgcccgctgtgtggaatgccacatgccggaaagcctgtacatggcccgcgatccgcgcagggatcattccttcaattctcccgatcccctcctgagcgtggagctgggcattccgaatgcctgtaccatgtgccaccgggaaaagagtaatgaatgggccgcgcaagcggtggaaaaatattacggggccaagcccaagatggcgcagtacagggaccgtacccgggccgtgcagcgtgcctatgaagggcgggaggatgtgctgcccctcctgatggaatgcttcaaaagggaggaagtgggcgcatggcgcgcgacgctgctggatctgatggatgcctgggcgcatgaacctgccgttcaggagctggctgcagcggcggtcaaggatccggactccctgacgcgcgccgccgccgccaaggtgatgggccgtgcgggcaatcccgccgcgggcaaactgctcaatgatcccttcaaggtagtgcgcctgcaggcggagtgggccctccgggattccctgccgccggacagccccggcatgaaggagctgaccgccgccgccctgcaccaggcggaccagccgtccggggcgatgaagctggcccagatagccatcagccgcaaggatgcgaaggcggcagaacagtggtttgccaaggctttgaaatgggatgccacctcttccgtggtgcaccgggattatgccgttttcctggcctcccagggccgcagcggggaggcggtgggccagatgagggaggccgtgcggctggctccgaaggatgccaatctgtggtatctgctgggcctgggccagattgaaaacaacgatgagccgggcgcgctggaatcctttaatgaagctctgaaaatagaaccctccttcatccgtgccctgttcaaccgcgccctgctgaatgaaaaggtgggacggctggaacaggctcttcaggacctggaaaactgttcctccctggacaaggagaatgcggatattccgttcacgctggcggtgatgctttaccgcaacggacggtaccgtgacgccgccgccgccgccgcggaagccctgcgccgcgatcctgggcacgcgcaggcaaggcagattttggaatcagcttctcgacatggaaggtaagaagtagtatatcagcgttatgcgcatgaaattttccccctggcgtattctgctggtgtccgcattcgtagcgggttcctccttctgttttgcggacgctcccggagcgtcggaggatccgtccctccgcatttggacgaataaaagcacgggcagtacggtggaggcacgtcctattgccttgaacatgaagaccgtcaagctggtaactacggccaaaaagcccatcaccatgccgttggaaaagctttccgaggaagaccgcgcgtggctggaggaacacaaggaagtgataggcaagcctgttgcggaatggtcctccgtgccgtccggccccgtggcggaggaaatgaaggggaaaacctacatgctggaaaacggcaagcttgaaaagaaggacgggaagctgaatcccgggcatttcatcctgtatttcagcgcaagctggtgcggcccgtgctgccggaatgcgccccacagcgtggaggcctacaacaaggcggtgaaggacaacccggatgtggaagtgatcatgtgcaatctggaccagaacctggaagccgcccagaaatgggccgccgccaacaacatgccctggcccatcctgctgaggcaggatttgacggagcttgccaagaaggtggctccgcgcggcatccctacgatgattctggtggataaggacggcaagcccatccagtcttcccaggacatggaacagttggtgaaagccgctggttcaagccgttcctcccgctaagcggcagcaccgtttgatcttttgaaacgatggcttccatccgcaaatcccagtcggaccgctctgcggaaaccagcggtaaaattctccgtgccgcgcagaaactttttgccctcaggggatttgacggagtgaccatgagggcgattgcctctgaagcaggggtgaatctggcctccattgtttactactttgaaaacaaggaaggactgtacctggccgttttcaggcaatatgcggaacccctgatggaggagcgcatgaaaatgctgaaagaagcggaccttcatccgtccctcagggcgtatgcccgtgccttcattgagcccgctttccgtttgctgctggataaaaatctgggcggtccggatcacgcgcgcctgctgtggcggctgccccaggaaccggaatacctgggaaggaagatttacgatgaattctatgctccgctcatccgggagatgacgttgagggttcgccgattctgcccatgggacgatgagctctccatatcctggcacatacatatcatgagttccattttccatgccacgctggggaaatacgtcacacggctggaacttcatgacaaggagccgtggatgaaggatcaggaccgcatcctgcaaatgattgtagatacggcggtcctgctgatttcccgtccggctctttctccggaggtagaggaaagacaggggtaaccgcggaagtggaatgcaatacccgggaaggcgcgtctttcctcacgcttctcccagtctttttctaagcgccgcgaccgtttccgttatatccgggtgtgtaagcagccaggaaacgatgacgaccctgcttgctcccgcctccagaacggagggcagcgtgtttccattaatgcctccgatgcagaagacgggaaactcttccggcaattgccgccgcacgcctgcaatgtcttccaggccgatcgccggccttcccggcttggtgcccgtgggaaacaaggggccgaatccgatgtagtccgcctgctcccggaacgcgcccagagcctgttccgggctgtgcgtggaacgcccgatgatggcgttcgcccccagcatggcccgcacgggagccagttccccgtcgtcctggcccagatggacgccgtccgcccctgtgcccagggcaatttcaggatagtcgttgatgatgaaaagacagccgtattcgcggcacagcggggcaagccggctacccatgcgcgcgatatgttccggatcatggtttttcgccctgagctggagaatgcccagaccgcccaccagcaatttttccgtaacggagattaattgatgttcagcggtatatcccatatccgcgatgccgtatagccggcaggatgagaggcgttccttcctgttcatggcagggaattgtaccggataaaatcatcccggcaagacgcttcccattcttgaccctaaaggagggtgtgatacactccccgcatcgtgtcacccgccttatattccgccgctaaaagtgtactgttccagatgaatccggaaaccgcccacaaagtgaccttgtgggggctgcgcctggcagaaaagatgcgcgtactgccccttctgatgggggaggttccttccgaccccgtggaaatcctggggatgaaattccccaaccgtgtgggtctcgccgccggaatggacaaggaggcggatacggtgaacgccttcggccaggccgggttcggctttgtggaagtaggcacgctgacgccgcggccgcagccgggcaatgacaaaccccgcctgttccgcctgattcctcagcaggccattatcaaccggatgggattcaacaatgaaggcattgccgccggagtggagaacatccgctccgccacccgttttcatggcgtcctgggcgttaacatcggaaaaaacaaggtgacgcccaatgaagatgcggcccaggactacctgacctgcctgcgtgcggcatggcccgtggcggattacattgccatcaacttctcttctcccaacacgcccggactgcgcgaccttcaggcggctgaacccgccgcgcgcctgctggcatccctgaaatcggagcagtccaacctggctgtggaaaccggacgcaatgtgcccattttcatgaaggtggcgccggatgtgacggatgagcaaattgcggaactcagccgcgttttcctggatgaaggtttggacggcctcattgccacgaacaccacgctttcccgggccggggtggaagccagcccgcgccgtgaagaagccggcggcctgtccggcgcgccgttgacggcgcggtctacggaagttattggagcgttcgcctccgaattgaaggggcgcatcccgatcattggcgtaggcggcatcatgagcggcgcggacgccgtcgcgaaaatcaaggccggggccagcctggtgcaactctacacagggttcatttaccgcgggccggacctcatccgggaatgcgtggaagccatgaaggctgaatgccccgttaactcctgattctccttattcactgcctacaggtttcattcatgcccggttccttcgtacatcttcacaatcacacggaatactctctgctggacggcgcagtccatatcaaggacctcattgccgaatgttcccgcatgggaatgccggccgtagccatcacggaccacggcaatctcttcggggccattgagctggtcatggaggcgaacagccttaacaaatccgtggccgcctggaacaaggaacatccggaaggaccgcagaagcaggaggtgaagcccatcttcggttgcgaggtgtacctttcccccacgcccatcggcgtgaaaaaacagcttcccgggcgccgcaaatatacgcacctgcttttgctggcggaaaatgaaaccggctggcagaacctggtcaagctggtatcccggtcccatctggaaggtttttattacaagccccgcgtggacatggaaaccctgcgggaattccatgaaggtcttatttgctgtacggcgtgccttgccgggccgctgaacgaatggctgctcaatgaccagcctgaaaaggcggaggaagccctcctggcgctgaaggatatcttcggggacgacaacatttttgtggagcttcaggaccatggcatggaggagcagaaaaaatgcctgccggagctggtgcgcatcgcccgcaagaccaatacccccattctagctaccaatgacgtgcacttcctccggaaggaggaccacgatatgcacgacgtgctgatctgcatcggcaccaacgaaaagctggcttctcccaagcgcatgcgctactccacggaagtctacctgaaatcccccgaggaaatgagggaggtgttcagggactatccggacgccgtggaaaacacgctgaaaatcgcggaacggtgcaacgtcaccatcaagctggactccgccagtacggaaaaatacccggaattcggcactccggacggctccacgcgtgaggattacctgcgcaaggtatgctatgaaggactggaggagcggtacggcaaggaacgcgtggctaaggacaaggaactccgcgaccgcctggattatgagctggggattatcaaccagttgaaattcccctcctacttcctgattacggcggatttcatcaactgggcgaaggaccatgacattcccgtggggcccggccgcggttccgccgccggttctctggtggcgtatgccatgaagatcacgaacatcgaccccctgcggttcgggctgatctttgaacgtttcctgaacccggagcgcgtcagccctccggatatcgacattgacttctgccagacgcgccgtccggaggtgattgactatgtgcggcagaaatacggggagcgcgccgtgtctcacatcatcacgtacggcaccatgggcgccaagtccgtgctcagggacgtggcccgcgtgatggacatgtcctacgcggatggagaccgcatttccaagctgattgaacccggtcccaaggtaaccctccagtccagctacaagagcagtgaggaactgcgggagctgatcgcctccgatgaaggatacgcggagctctggggttatgcgacgcgcctggaagggctgatccgcaacgtgggcgtgcacgcggcgggcgtcgtgattggtgaccgtccgctggacgagcatgtggcgctcacccgtgacgacctgtctgatcctcatgcagccgtcgtcgcccagtgcgacatgagcgcgatttatgaagtgggtctcttgaaaatggacttcctgggtctgaaaaccctgaccgtcatgcatgatgcggaggaatacgcccgctggcgcgtgccggacttcaagctggattccgtgcccttggatgaccgggaaacgctggacctgctgaacaggggggacacgatgggcgtgttccagctggaatccggcggcatggtggatacctgccggcgctacggcatccagaagattgaagacatcattgacttgctggccctttaccgtccgggagccatgcagttcatggatgaaatgatcgaggtcaagaaggggctgcgccaggtggtgtatgaacacccgctgctggaacaggtcagcggagagacctacggcgtgatgatttaccaggaacaggttcaggcggcggccaagctgctggcgggctacacgctcggcggggccgacctgctgaggcgcgccatgggcaagaaggaccctgcaaaaatggccaaggaaaaggcccacttcgtggaagggtgctggaaaaccaaccagattgatgaaaagacggctacggccatctttgacaagattgagaaattcgccgggtacggctttaacaaatcccactccgcctgttacggccacatttcctactggacggcctacctcaaggcacacttcccggtggaattcctctgcggcctgatgtccaatgaagcgaacaacgacaagatcggcgtgttcattcaggaagccaaccgcatgggcattgaaatcctgccccccaacgtgaacaaatccatgctcaaattcactccggaggaaacgccttccggcaagctggccgtgcgctacggactggcggccatcaagaatgtgggggaaggagccatgcagattcttctggaggaaagggaaagaaacggggaattcaccagcatggaggacatctgcaacaggctggattccaaatccgtcaacaagaagattctggaatccctgattcgcgcgggagcgctggactggacgctggaaccgcgctgcgccctgtttgagcgggtggacctggccctcagcggcgcatcccaggtgcacaaggacaaggccctggggcagggcgccctgtttgacatgacttttgaagctcccagggtgaaggatgagcctgctgttctggaatggtccaaggagcagcgcatgggggatgaaaaggacctgttgggcgcctacttctgcggccatccgctggactccatgcgcggcgtcattgatgcggaaaaatacacccgcatcggtctcattgacgcgctggagtcgcacgaactcaagcagaagcaccagatcgccggcatggtgcgctccgtcatccccaagatcagcaaggcaggcaggaaattcgccatcctcacactggaagattttaccggcagcattgaagtgctgctgtggtcggatgtctatgaaaaggccctggaaatggaaggcggcctggaaccgggcgtcttcgtctccgtgcgcgccaacatccgggaggatgaccgcacttccgccaagagcgtggccgcgcagagcgtggacccgctgggaggcaggaggcgcaagtccaaggccggggaccagggccctctgaatatcattgtcagccccctgcgccacacgaggaaaaatctggagcagatacgggacatcctgaaaaggtaccccggtcgttccaaggtcaatctcacgatcaaggacagcctgggccatagtcaaatactggagctggacgaacggttccgcgtgaaccgctgtccggagctggaaacggaactttccatgtacaactagcgccatgccgggaggaaaactgctcttgccggaatcggaacggctggcattccgggcgtggggggaaagggactggcccttttttgcggccatgaacgccaatccccgggtgatgcgtttcttccccgccgtcatgacggaggaggaatcccgcgccatgtggaaccgcctgcgggcggaactggatgaaaagggttacggggtgtacgccgtagagctgaaatcttccggctccctcatcggcctccttggttttcattgggcggattttaaagcggacttcacgccctgtgtggaaataggctggcggcttgtgccggaagcctgggggcatggctacgccacggaaggggccagggcttgtttggagcacggttttgccaggttgggccttgaccgggtgtattccttcaccgcctgtgtgaatcttccttcccaggccgtgatgcagcgtgccggaatgaggaagacggcggaattcaaccatcccaaagtagctccggattccgtcctgtatccgcatgtgctgtatgtaagggaagcttcccacgcatgattccatgacggggtttccggtgtagcctgccggaggccggccggtccatttttttaattgttctgcctcctggaaagcaacggacgcgtgcatttccggtgaaatggccagtgcgttctttacgcttgttgctgccggtttccggaaaaaatcgaacgggctgcaatcccggaggaatgcagcccgttgactgggcagggggcgcagggcagcggaacgtgcccgctgccgtcatgcgcgacttagaaggcgtagcttaccccggcgttgacccggtggtaggttgacttgctcctgccttcgaattcatagccggcgtaggccgtccatttggggttgatgacgacggtgctgttgtaattgacgcgtacggcgttccggtccgggcgggaacccctcgcggtccagctgaaatcgttcagcaggcgcgtggccctggtttccgggttgtcacgcaccacgtcgggcacgtagcttacggacaggctgttcacccacagcacgccgttgctgaattgcagggccttgctgacgcctacgcccacgggcaggctcaggttcttcagattcccgcggtcgaagtgccgggcgtcatatcccgtttccgtgaaggaattctggttgacctgggtgtactcgattcccaggaagggggagagcgtccagcccttgttcaggctgtggtcccacgtggcctgaagggtggcgaagcccattctgttctgccatttgccgtgggaagcccctccgtcataataggagtccagcttgttggttgtccatccgaagccggctgttccgctgatggtcagcatgtccttgggggcaagctgctttctccatgctccgtaaagcagggcaacgtaggaggtctggtccacttcgctgggccagctgcggctcttgttggtgccgtacaggttgccgaaggcggcgcccagaatggtgttcggggtgaacctgcggtccgcacccacggcatagccgccaccgttgtagtcgtagccgtcaatgccgtcgcgggtggcatggtaggtgaagtctcccattcccttgatccagaagttattcttcggacccatcaggaaccgggtgatgcccacctggcccagagcggcattggaaacggacttcatgttggaagcggagctccacatggagttgccgatgtccgccccgtccagttccgggagaatctcttcaatgccggcggtggggttccagacggcgtacagatggtcgttgattccgtctccgtccaggtcttcccattccttggtccagtacccttcgtaggtatagggggagttgaccgtattggttccggtggctgtggaatagatgtcgtcaaaatccccggaagttccgggaatggccgcttccccgatggccatggccaggaagcgctgcttctcggcccatctcttgtgggcgtaatcctccagggaatccgctactcccatggagccgcccatggtgtggctgttggcttgctcaatgctgagtccggagctgtaatcgtccatgaaggggcggaagtcaaagatgacgcccttgctgatgtcgatcgtgtccgcatggaaggcggcgccccttccggttctcagggtcacgccggattcaatggtgatgttcctgctgttcacggaactgtttcccgtgatttccagaacgcccttattcacagtgaaggatgagtctttggtgaggtccttgttgccgtatgtcacaccgtcttccagaatcagggtaccatcgtacaaggtggtttttccgctgacattgaagtacttggactccgccagccggttttgccagtcggcttccgtttctccggcggcctgggtgatcagcttgtccgcctccgctccggaaaagcggatggttccggtgaattccggagccgttccgttgtaaggagtggtatccactccttcggacttgttgaagtcatagacaatgttgtcatactccgctccgtcgccttcattccggaagggatcgtagaaggtgaccgtccttccttcctgcgcgcggagcaccacgctgtccatggaagcgcttccgttggttccaaacaccagggagttcagaatagggttggccccgccgcgtttttccgtgttgcctttcacgatgatgtccccctggtcagcggaaaagacggcatccttgtaatagaggagcatggctcccgcaacaccgtcaacggagttgttctcaatgagcacgccgccgcggttgttgatgaactccaggccgttggccccctgaagtgctccaacgtcccatttggccgagttgccggagatggtgaccttccccgtattgacgaaggatgttttcccatccaccaggagggcgccataaccgtagtccgtggatttgttgccggaaatggagatgtctcccgtgttggcaaaggacaggttcccgtggaactgccccacgccgtagtgccagcccgccgtattattgtccatggagatgtttccggtccgggtgaacgaggtattaccggtcacctcaatggcgccgttgtactggtccgcgctgtttccggaaagggaaatgttccctgcatccgtcacgctgaacgttccgtaaaagcgcagggctccgttggaacccttggtggagtttccttccacggtgatgtccccattgttgctgaacgtggtattgccgaagacggctacacctcccatttgattgtccgagctgtttcctgaaatggtgatgtttcccgtattggtgacgttccagtccttgctgatccagcctacggcatacgtcttgtccgcgtggttgccgatgaaggtgatggagccgatgttattgaggttgaagtttccgctgacgccgaatgccccggcgctgttgctggcctggttgccttcaaagcgcaggtctccgccgatgttggagatgtccaggtcctggccgctgtatactgcgccgaagttgccgttccagtcggaggccagttccccggcgtccgcccggttgttcctgaaaatcacgtctccggtgacgccggctatcttcatgccgcctccggtattatcgtagccgtctacggcgcctgcataagcgtaaatggcgccggctatccatgcggaattgttttcaaaggtcatgtttccggtaacgttctggaacgtcagcgcatattccccggcgggaatgtaagccttggttgccgtagaagtggaatcatgcgcgcctgcataaatggcgcccccgatgttggagtgggcgctcgtgggcgagtgtccggtggagtttccgctgaacaggatggacttggtattttcaaagtcgatctttccccacgtgaacagggcccctccgagggcttgcccctgctggctgtcgtcacccagcatgttgttggtgaaggaaatattgcccatgtgggagaaggtgatgtcaccccttgcgttcacggcgcccccggcattcgtatccgcattcacgatggatttgcagttgttgaaggaaaggtcgcccatgtccgtgaaggtgagcgtttctccgcggatggcgcctcccccttcgttgtcattgacccagcggtcgctgtggatggaggaacaatcgtcaaagctcatggacattcccgtgccggtaaatgtcatgacggactcgctggcgggccgggtgtggtctgccagctgattgaagaagacgctgcctgcgaagacggtgtcttccgtccggaatccggaaaagctcaggtcctccttcaaggtgtaagtgatgctgtcctgcgtctcctggcgcgtgacaacggtgccctgatagaggtcttcagcctgttgggctgttcccgtctgcgccagggaggctgtcatcaggagaaggatggcggatactgcaaattttggtttcattagtatgcggtaaggttctttgttaggtaccagacctgagccgtcttttgcccgggcgcccgggtgggggcttttgcgcgcgctggcaccggtgtctggaaactataagagtcttttgagcgcgttttttctcaacggatgtcatgctgtacgcaaggctcttctaacatattattccgcttggccgttgaagctgaaaatgtccgggcccctcatctgtgaaaatatggcctgtgtcatacatagggtgttttatgagtgtaggtcaggaaatataacaaattttgtaatttaatgatttttagtaacgcatggataataaaataaagcttgttcctgtatttttgtagaaaagttatgcgggggtgaatgacaatagaaatatgaacacttttgttcgtagaagcttctatccttcatgcgggcggtctttcacggctggcccggaaatgatgaaacaatagataccgtcatgtttgatccaaatcaaaaacccgatacagcccgggcagaaaattccattttcggctctccggaagcagacaacctcctgcccaaggatcagttcccggattacgccatgcgtgcggaggacgccttccagttggtgtccgatgaattgatgctggacggcaatgcccgccagaaccttgccaccttctgccagacgtgggatgaaaagcaggtcaggatgctgatgaatatcagcattaacaagaatatgatcgacaaggatgaatatccccagacagccgctattgaaatgcgctgtgctgccatcattgccaacctttggaacgccagccaggatgaaaaacccatcggctgttccaccatcggttccagtgaagcgtgcatgctcgggggtatggccgccttgtggcgctggagagcccgccagaaagctgccggcaaacccactgacaagcccaacctggtatgcgggcccgtccagatctgctggcacaagttctgccgctactgggacattgaaatgcgtgaaatccccatgtcacccggaaaatggaagatggatgtggacagcatgctggaacagattgacgaaaacaccatcgtggtggttcccacgtttggcgtgacctacacgggcgcttatgaattgccggcggagattgccaaggccctggacgattatgaagacaggactggcatcagtgtagacatccacgtggacggcgccagcggcggtttcctggccccgttctgcgctccggacattgtctttgacttccgcattccccgcgtcaagtccatcagcgcttccggccacaaatacggtcttgctccgctcggagtgggctgggtggtatggagagacatcgccgacctgcctgaagggttgatcttcaacgtcaactatcttggcggtgaaatccccaacttcgccattaacttctcacggccggccggacagatcatctgccagtattatgacttcatccgtctgggcaaggaagggtataccaacatccatacccaggcctatgaagtggccaagtacatttcagatgaggtttccaagctggggccgtacgaattcatttgcacgggcgatccggaaaagggcattcccgccgtctgtttcttcatcaaggatggagccaagacgaactataccctcttcgacctctcggacaagctgagaacccgcggctggcaggtgcccgccttcaccctccctgccaattgccaggatacggtggtgatgcgcgtgatggtccgccagggcttcaccaaggacttggcagacctgttcctggaagacttcaagcgcatggttgatttcttcgagaaacacccggtcacttctccgatgactgcggaagaaggcacggccttccaccactcctgatggaagctccgcataataatttttgttggatgaataagtgtgtgtaagcgcagctccgcagttgtcaaggtttgtgcgtggacctggcggctgcggagtttttttatgctccggcggttgcgccgcggatggcggaagcgtgatggaggcttctgttgcggatgaacgcggactgttccggaactgtttccgaaaggggctttgtgagacctggcggacttttccgttccccctccggaattcgcggaatgccgtttttccaagttgcttcgtgaaatcctgcgcgttccccgtcttcttataaaaagaccgggcattttgttattcctgcgtcttccgtttcgtttgggaaaaggcatgcttccgcaaggttccttgcatcattctttcggaagggtgggggggttgtagcgcgggctacggataaatgcggggtccacctgtttgaggcgccatctttacttggtgaaagattgctgcgtttcaaagcctggcgcgttgccgccatgtccggacaggcgggattgataaaaaccgtcctgttttttcatgccgccgggttgcagaccctgcggagattaccggcaggggacggcgcggaggctgttgattccctgatctgcttacatgatgccgcgtcgcggacgcattgccggctggcagcgaatgatggattcaaaaaaattgtgcccgccgctttaacacgatcggcaaaaagcaagggaacaaccccggtcaggagtcttccatccatcctcacatccggaatgcagcgggaggcgtggaatggcgcttagctgatgcagcggtaatagtaatccacgcgggaaatgaaccaggaccatttgaaaccgggcttgccgttgtccagcagcaggtgggggcagcgttttccggtccagtagtaatgcggcacgacgttccgcagcgggatatcgtgggcgtacatgttgtaggcggccagcttggcggcgcggtcaaaggtcttgacgatgctctgtccccgcttttcgcacatttcaatgccgatggaatacatgtccccggggccgccccggtccgcatggcgtcccgtttcattcagggggatgtgctgcatggctacatacggatccaccgtgtagtgccagttgcagcgcagggctccgttattcagcgcgcgcgcgtgctgcatggcgtctgcggaagggttttccgtgttgtgcatggtgatgaagcgcggcttcatccgggaagagcgctgccggagaggggaagagcggggcatgaacatcggccggacgttgcattccgccagcagctgccgcggagagcgcttcaccacggggacaccggagggcttgaaggaaatcatgggcgccattccggctttgccggagggttccgaacaactggtcagggccagcagggcggcggcttccagcaggaaggttctgcggtccatgccctggactttctccagcatgggctggagctgtccggaaacacgggcaagataagtggcgatggtggaaatattgctcatacagcgaccgggaggtgggggatttacagcacggatgcgggaaaagtttagttcacgctaagattcacctttcttctttgcaacgaaaaagtgtgaaagctttagctttgtgccgaattcttcacgctttttgtcatattgggccgttcaaaccgttgttgagagcaaaacggtatccggttccacggcggtgacggcgtccgcatttgccggagacaggatgaattctccctgccgcgccgttttcccgtcccaggacacggagccgcggagaaccgtgaagatggagaagcgggaggcgtccggttgggtgaatcgttctccctggtccagccgatattcctccgtggtgaaatgcggcatttccgtcaggtagccgggttgccggcagagttcccggaattccgcgatggaatccagcgcctgttccatgtgcagttcccgtccctgtccggaagcgtctgtccggttccagtcgtaaaggcggtaggtggtgtcgctgttctgctggatctccgcaatgaggtgcccggcgccgatggcgtgaaccaggccggcgggaatgtaaagatgttcccccttttccagatgggtggagcgtatcagttgctccatttggcccgtttccgccgcccggcggatgtccgagagcgtagcggtttcttccattcctccgtaaatcagggcatccgggtctgcatgcagcacgtaccatacctcgtttttaacctctccccgccgtgctgccgccgtgcgttccgggggatgcacctggacggaaagattctcacgggcgtccagaattttgcagagcaggggaaaacgcgtaaaacgttcgtagccgggcccgaagagttcttcccgctgttcttcccacagccggtgcaggggcattccttcccattcgccttcccttaccgtgctcatggcttccggacggtcgctgatttcccaggcttccccgtaggccgtttcccggtcgggcagttcccggcccagcatggttctcatgtgctggccgccccagatgcgcggctgatagatggaatggaatcgaaaaggctgcatcgtaataacgggagcgtaggccatcttttacggccggacaagtaaaatgcccgcaggaggcctgcgggcatgaagagagggaaatcggggagtttccggttatttgatggattcccatacgatgccgatctcatcaaacggcacatattccttgttcttgtccggtttcggcacaccgtagttggtccggaacaggggcaggatgggcgctcccgtcttggggtccttgctcatgggtgccattcccacttcctccagcagcagggtcatgccgaattcgccgccgggaccttcgctgaccaggatttcaatggggtacaccttgccttgctccaccgtgaactgcttgccggcggctacgccgcgcatggtgttgttccagtggccggaggggccgtatttgtagaacgtgacgggggggacgttgatgcccgcgtccttgagttccttcttcaggtcgtcgttgccgggcttgccttccatggcatcaagccatttggcgttgttcgccgtcattttccccagggaggcggattcccagccgtagtcgaatacgttctggttgttgaaccgcactaccaggtagtcgtctcccagccccacgaagcggaacgtgccggatttgggagcgcgcactttgccccggtaaatggcaagccactggctgggtttcaccttgtcgtcgcatccgtaggccttgggcgcgtctttggcgggagttctgggaatgtagaactgggcggcgtacaattgctgcggcgccttgtaaaaacgattcagctccgactcattccagcctttgttgacaaagcgggaaagaaaggcgcggtactggtccatcgtcatgttggtgggccgtccgccgggcgtctgcttggtatcgtaaaaggtgcctaccagcgtacttcctgagggctgggacgtgccgaaggcggaggtggcgtcacccaggtcggggccgaagccgtcccccatgcccagagcggttccttcttccagcatgacgggttcgtccggcgggtcaatgtcgatcttggggaggctgaccggggctgccgccgcggctaccacgactttgacgggagtttccgcatgggaggaagaggaggtttccctctgcacttccggcggcggaggcgtatccgacggaggagcttcgtccggcgtgatgtagccgacgaccttgggttcttccgggggggcgatgatgatggtcagggagtagagaatggctcccgccaggacgacggagagaatggatgtcgccaatgcggcaatgtaatttttccgcctttccttgcgcagggtttccactgcgtcttctgtgggttctatatgaaggctcatgcatgtatgataacataggagccccatatgttgagtaacatgaggataacaaggataacatgtcggtaacaaaaagggcgtctttgacgccccttcttccttatggcttctcagcttttcctgcgctttcccgtttttccgggagccagtgcgatggcaagaatggaacagacgcccagaatcagggggtaatacaggtattccatgatcagcaggggggaaacctgggcgattccggcggccatgagcatctgggccccgtagggaatgacgccctggaccaggcaggaaaaggtgtccagaatactggcgctgcgcctgggcgggatatggaatttatcgctgatctccttcgcgatgggacccaccgtaatgatggcgatcgtgttgttggcggtgcagagattggccagggagaccaggccggcgatgctgaattccgcgccgcgcctgctccggatgtgggccgtgatttttccgatgatgtacgcaatgccgccgttgaagcggatcaacgccagcacgccgccggccagcagggtgacgatgatcagctcccccatgccggtcatgccgctgcccatggcgcggaaccaggccatgaaggaaaaataccccatgcctactccgacaagtcccgtggcgagcagccccagcgtcagaacggccatcacgtggactccggccagcgccgtcaccagaaccagcaggtaggggaacaccttcatccattcaatgggagcgtccgccatggagggggactgcacgttccatccgagcaggatgtagcaggccagggccagcagcgcggcgggaagcaccaccttcacgttagcccggaatttgtcccgcatggcgcagccctgcgtgcgggtggcggcgatcgtggtgtctgaaatgaaggaaagattgtctccaaaaaacgctccgcccaccacaatggccgtcatcatgccggtgctgacctgcgtggcgtgcgccagtcccgtggctacgggagcaagcgccacaatggtgcccacagaagtgcccacggaaagggagatgaagcaggatgcgatgaagacgctggcaagcagcagattgtccggcaggaggcgcagcgtgagctgcacggtggcgtcaattgcccccatgtccctggcggactgggcgaatgcgcccgccagcacgaaaatccagatcatcatcaggatattccggttggctacgccggaggaaaacaggtccacccgttccgccatgcttttcccgcgggtgatgagcacggcccagactgccgccgccgtaaaggccaccgtcaccggaacggcgtaaaaatcctgtacggctacggagatgaccaggtaaagcaggaagaaaaccagcagggggctcagcgcccacaggctgggtttgacgggcgccgtatcctggctgtctggaaaatgggtcatggggagtgcgtgctgccggagatgctgggcggcttagtttccggcggcttcctcttggtccagataccaccggtagatgcgctccacgccttcttccagctccacccggtgtttccagcccagggaatgcagcttggaaacgtccgtcagcttgcgcatggtgccgtccggcttgtccgcgttgaataccagttctccccggtagccttccgtgacggctatcaggcgcgccagatcgccgatggagatttcctttccggtgccgatgttgatatggcagttccgcacctcccggtcttcccctttcagctggctgaaatccacctgttccatcacgtggacgcaggcgtccgccatgtcttcgctccacaggaattcgcgcaggggcgtgcccgttccccacagttccacggaaccgggggtgatgccgtatttggccagcgcggccaggatggcttcttccggcgccgttccgtccacctgttccacaggccgcgcgtccaggtctttccggacggcgtcccagtccccttccatcaggcgcttggccaggtgaatcttgcgcaccatggcgggcagcacgtggctgttctccaggtggaagttgtcattggggccgtacaggttcgtaggcatcacggcgatgtagttggtgccgtactggaggttgaagctctcgcacattttcaggcctgcgattttggcgatggcgtagggctcgttggtgtattccagcggggaggtgagcagggcgctctccttcatgggctggggtgcctctcgcggatagatgcaggtgctccccaggaagaggagcttggatacgccgtgccggaaactttccccgatgacgttctgctggatctggaggttgcggaagataaagtccgcccggtaccgtgagttggcgataatgccgcccacgaacgccgccgccagaaagacgtattccggcttttcccggtcaaagaattcccgcacggccgccgggtcctccaggtccagttcccggtgcgtccgtccgatcaggttggaataacccctctcttccagggatttccagatggcggagcccacgaggccgcggtgtccggccacgaatattctgctgtttttttccatctcaggaattgacgggatttttgacgtattccatgtcgtggcggaccatgatgcgcacgagttcctcaaacggggtggaggtggggttccagccgaggagggttctggccttggtggggtctcccagcagttgttccacctcggaggggcggaagtacttgggatccacttccaccaggatatggcccgtcttcttgtcgcgcccgcgttcttccacgccttcgcctgcccattccagctcaattccggcttcacggaaggccagcgtgcagaattcccgtaccgtgtgcatttccccggtggcgatgacgaagtcttccggcttgtcgtgctggagaattagccacatgcattccacgtaatccttcgcgtagccccagtcgcgcagggcgttcaggttgcccagataaagcttgtcctgcatgccctgggcgatgcgggccgccgccagcgtgatcttgcgggtgacgaagttttccccgcggcgttcgctctcgtggttgaacaggatgccgttgacggcgaacatgccgtaggattcgcggtaattcttggtgatccagaagccgtattgcttggctacgccgtagggggagcggggatagaacggcgtggtttccttctggggaacttcctgcaccagcccgaagagttcggacgtggaagcctggtaaatgcggcatttcttttccatgcccaggatgcggacggcctccagcatgcggagggtgcccacggcgtccgtttccgccgtgtattccggcacgtcaaagctgaccttcacatggctctgggccgccaggttgtagatttcatccggctgcacggtctggatgatgcggatcagggagctggaatccgtcatgtcgccatagtggaggttgatcagccggtttttcttcatgtcccgcacccactcgtccaggtaaagatgctcgatgcggcccgtgttgaaggaagaggagcggcgcaggatgccgtgtacttcatagcccttgtcaatcaggaactctgcgagaaaagaaccgtcctgtcccgtgatgccggagattaatgcgattttgctcatgtgctgtgtgtaggtggtttgttggcggaggaggttgaagaataaatggtgaaacctccagcggagccgcagttgatgcgctccgggcataaatagcgcatttttcccatggtgacgaggaaaatgctctggtcatggaagaggaatgccactgtcagcggacggcttttcctttgccggacgcaatcatttccttgaaatcccggaacaggtactgggggtctctggggccgggggcggcttccgggtggtactgcacgctgaaaacggggagcgttttgtgggcgatgccctccacggtattgtcattcaggttcatcagcgtgatttccacgtcgtccggcacggtatccggatccacggcaaaaccgtggttctgggacgtgatgctgattttacccgtgcggaggtccttcaccggatggttggcgccgcggtggccgaacttcagcttgaaggtcttcgcccccagcgcgtgggaaatgatctggtgccccaggcagatgccgaacatgggaaccttcccgatcagggcggctacttcacggtggatgtccgtcagcgtggcggggtcccccggaccgttggaaagaaaaacgccgtccggcttcatgccaagcacttcctccgccgtcgtgtgggcgggaaccacggtcacacggaagccgttttccctcagttggcgcaggatgttgtacttgatgccgaagtcgaaggccacgatgtcgtactccgtggggggcagtaccccttccgtcaccagcgcgtccacttcctccggggtcatgggatgggagccgatcttgtctacgatgttgcagccttccatggagggggcctttctggcggcttccacggcttcctccggcgtcagctccgtggtgaggcaggcgcgcatggcgcccgcggagcgcaggtgcttggcgatcttgcgggtgtccaccccttcaatgccgatcacgccctgcttttccagccacgggcccagggcttccgtggcgcgccagttggaaggaaccttcgccagctccgccaccacgaagccgctgacctgcgccttgccggactcgtaatcttccgggttgacgccgtaattgccgatcagggggtaggtcatcgtgacaatctggccgctgtaggacgggtccgtcaggacttcctggtagccggtcatggacgtgttgaagcaggcttcccccacttccgtgcccgtggctccgaagtgcgaaccgatgaagacgcttccgtcttccagtgcgagaatggctctcatgatgatataaaaatgctgtttggtatggggttaaacggtctgggcatggtattcctggatggtgcacacctggaggttcctgttcttcagcgcctcaatggcgttcacgcaggcctgtgcggaggccaggttcgtgcagtaggaggttttggcggcgatggcggaggaacggatgatgatgtcgtccgcccgcgcgtcgtgggagccgggcgtgttgatgatgaaatcgatgtccccgttcttgatgtggtccacgatgttcgggcggcgcgcctcgttcaccttgtacgcgcgttcgcattcgatgtcgtgctggagcaggtggatcatcgtgccgcgcgtggcgcacagcgtgaagcccatgtccgccagctggcgggccatgtggagcacgcgctccttgtcccggtcattcacggagatgaaaaccttgccttccgtcggcaggggattgaatgcgctgatctgggatttggcgaaggcgatgtccgggtccgggtcgatgcccatcacctccccggtggatttcatctccggccccagcaccacgtcgatgcccgggaagcggccccaggggaagacggcctccttcacgcagtggtattccggcgtgatttcccgggtaaagcccagctcctccagcgtcttgccggccatgacctgcgcggccagcttggcgaggggcctgccgatggccttggagacgaacggaacggtgcgggaggcgcgcggattcacttcaatgacgtaaagctgttcgtccttcacggcgaactggatgttcatcagcccgcagacgttcagccgccgtgccagctccttggaggcgcgcgtgatttccttgtgcattttcatggaaatgcccatggcgggaatcatgctggcggaatccccggagtggatgcccgcgggctccacgtgctgcatgatggcgccgatgacggcccgctcccggtccgcgatgacgtccacgtcaatctccacggcgttttccagaaagcggtcgatcagcacggggcgttcctcggaggcctccacggcttcgttcatgtaccggcgcagctcctgctcctcgtacacgatgatcatgccgcggccgcccagcacgaaggaggggcgcagcagcaccggatagccgatgcgggcggcaatagcggcggcgtcctccacgttggtagccgtccccgcgtccgcctgcttcagccccagctccctcagcagggcggagaaatgttcgcggtcttccgccaggtcaatggccttcgggctggtgccgatgacgggcacgccgtgggcttccagggcgttggccaggttcagcggcgtctggccgccgaactggacgatgacgccgtccggcttctcctgctcgcagatgtggagcacgtcttccagcgtcaggggttcaaagaaaagcttgtcggaggaatcgtagtccgtggagacggtctcagggttggaattcacgatgatggtttcataccccatttcccgcagggccatggaggcgtgcacgcagcagtagtcgaactcgatgccctggccgatgcggttcgggccgcctcccaggatgaggatcttcttccggcccgtgtcgcgcgcctcgttttcatccccgtacgtggaataaaagtaaggcgtgtatgcctcaaactccgcggcgcaggtgtccaccaggcggtagccgggcacgatgccctgttcgcggcgttccttgcggatgctttcctccgtagttccgcgggccagggcgatctgcctgtcggaaaagcccagcttcttggcttcccgcaggtccagcgcgtccaggcggtcgcccgccttcgccaggtcccgcatctgggccaggaaccaggggtcaatctgggtgagctggtgcacctcgtccagggaaaagccgctgctgaacgccgtctgaatccagaaaatgcgttccgccgtggggacggccagcttccgcgtgatttcctccgcggtgggcttctgcggcgccttcgcgtcgaaaccccagccccagcggcccgtttccagggagcgcagggccttttgcagggattccttgaacgtgcggcctatggccatggcttcccccacggatttcatggaggtggtcaggtgctcgtccgcctgcttgaacttttcaaacgtgaagcgggggaccttggtcaccacgtagtcaatggtgggttcaaagcaggcgggcgtttccctcgtgatgtcgttgcgcagttcgtccagcgtgtagcccacggccagcttggcggccagcttggcgatggggaaccccgtggccttggaagccagagcggaagaacgtgaaacgcgggggttcatctcaatgacgatcatgcggccgttggccggattgatggcgaactggatgttggaaccgcccgtttccacgccgatctcccggatgacggcgaaggaggcgtcccgcatgacctggtattccctgtccgtcagggtctggatgggagccacggtgatggaatccccggtatgcacgcccatcgcgtcaatgttctcaatggagcagatcaccacgcaattgtccgcgcggtctctcatcacttccatttcaaactccttccagccgatgagggattcctcaatcaggatttcggaaacgggggagaggtccagcccgcgggcgcagatttcctcaaactccgtcttgttgtacgccacgccgccgcccatgccgcccagcgtgaaggcggggcggataatcaggggaaaggtgcctatgtccccggctacccggcgcgcctcctccatcgtgtgggcgatgccggagcgcggcacgtccaggccgatgcggatcatggcctccttgaacaggttgcggtcctccccgcggtcaatggcgtccgcatgggcgccgatcatgcgcacgttctccctctccagcacgccgctgcggtggagctccatggcgcagttcagggccgtctggccgcccagggtggggagcagggcgtccggcttttcccggacgatgattttctccacgaactccggggtgatcggttcaatgtaggtgcgcggggcggtctctgggtccgtcatgatggtggcgggattggagttgaccagcactacttcataaccttcttcccggagggccttgcaggcctgggtgccggagtagtcgaattcgcagccctggccgatgacgatcgggccggagccgatcacgagaatctttttgatggaggtatctttaggcataatggcgatggaagaatcctgtggttctggaccgtggatttccgccgggggaattaagtgcccgcagggctccggaggaaagtttttttacggccaatgacgcggatttttcaggggttggtggtcggtggaaaacagtgggaaaaagggcggccgggacagggcgcgccaaggccccggagccgtgcctttccctctgcgggcagaggcttgccccgcaagggggccggcaaagctccggagctcgtcggtgcaccctaatagatgaacagcatttcccggtacttggggagaggccaggaccggtcgttcaccagggtttctgcggcatcgacgctggttctcaatcgggacatcgcggcaaggatgtcctcatggcagctcgtgagcgcggtttccagggtatccaggtcggacacgacggaatccagggcgccgcccagcttgtccgccagcttttgcagggcggcggtcccgttggtccgcttggcgtccagcgccctggagagcgcggaaacggtttgcttgtattcgttgcgcagggcagggaggatgatggtggccgccatttcccaggacaggcgcccttcaatgcggatgcgcctgtggtattcctccaggaaaatctcaaaccgggattccagttccctgcgggagaacaccccgtacttctcgaacagggccacattcttctcattcaccagggtgtggagggcggtcatcgtgtttttcaggttgggaaggccgcggcgttccgcttccttcacccattcctccgaataattgtctccgttgaagatgattctcttgtgttcggaaatcctgcgcttgagcgtctcctggagctgggccaggaaggtctccggagcgaaggaggaaagctcctccgccagggaatcgaaggcctccgccacaatggtgttcagggtcatcatggggcccgcgcaggactgggcggagccgggggcgcggaactcgaacttgttgccggtgaaggcgaacgggctggtgcggttgcggtccgtcgcgtcccggggaaggacgggcagcgtatccacgccgatctggagcgtgtcgttgcgcctgccgcggccggattccccgttgatgatattctcgatcacttcattgagctggtcgcccaggaaaatggagataatggcgggaggggcctcgttcgcgcccaggcggtggtcgttcccggcgctggctacggaattgcgcagcaggtcgctgtgcttgtccacagcctcgatgatggcggccagcacggtcaggaaaatggcgttctgctgcgggtccgtgccgggatccagcagattcttgtccccgtaggaaatggaccagttgttgtgcttgccggagccgttgacgcccacgaagggcttctcgtggagcaggcacaccagcccgtgcctgctggcctgctggcgcaggatttccatcaccagcatattgtggtcgatcgccaggttcacgtcctcaaacaagggggccagttcaaactgggccggggccacttcattgtggcgcgtcttggccggaatgcccagccgccagagttccttttccacatcattcatgaaattgaggatgcgcggcttgatggagccgaaataatggtcttccagctgctggtgcttggcgggcggcgcgccgaaaagggttcggcccgtctggaccaggtccgggcggttcagatagaaattcttgtcaatcaggaaatactcctgttccggccccagcgtgatggtcacgcgttcatccggcagcccgaagcacttcatcagcctcttgacggcgttgcccaatgcctgccgggagcggagcagaggggttttcttgtccagcgcgtctcccgtataggaacaataggcggtgggaatgcagagggtggctccgttcccgtgcctcttgatgaaggcggggctggtggggtcccacgcggtgtagccgcgggcctcaaacgtgcagcgcaggccgccggaggggaagctggaagcgtccggctcgctcacgatcaggttcttgccggaaaagctcatgatcggctccatgcccttggggtccaggaaggaatcatgcttctccgccgtggaacccgtcatgggctggaaccagtgcgtgtagtgagtggctccccgttccagagcccactgcttcatggcgtgggctacgtccgcggcaatgtccgcgttcagcggcaggccgtcctggatggtggacaggagggttttcgccgtgtccttgggcaggtacttcttcatcacctccgtactgaaaacgtcggcgccgtaataatcaatgcggacaggagcgctctcgctcaccccgctcacgggaagggaggcgatggcgctgatggcttgtgttcttgtcgagtcactcatcatggttaactgttgtgtctttttcttagcaagaaccgtgccagctttttgaatcaacttgtgccggagtgggtatggtgttttaagaagttgcctataaatatattgcagaaattgtaaaaggaagccgtggaaagaagagggatgaaaaaggtgaaagcattaattacaaaaatgtaaaatcacggtaaaagggtaattacgaaaatgtaaaaatatctgcttgggagagggaattgtcctttgccgccgtgggtcctctgtcatgccggaaggcctgtcaaatcatgtaaaaccggggcggcggcgttcggaaaacgtggagggtggaaggagtgcataatgttggcacggtttttgctataagaaaatcagcttaactcaaataaaacagcaaactgatgaatagtgatcaattcgagacaggcattcctgcgccgcagggattgtatgactttgaacaggagagggacgcctgcggcgtggggctggtggcggatctgaagaatgaaccgagccacaaaatcattgaaatgggtgtcaccgttctcaagaggctgatgcaccgcggcgccgtgggaagcgatcccgataccggggacggagcgggcatcctgctggccctgccggatgaattcttccgcctgctccttcccaacaaacttcccgccaggggcaaatacggagtcgccatgatgttcggcggctgcggccatgaagaggaactggaggccgccgtcacggaaaacggcggcagggtgattgcctggagagaggttcccgtggaccgggacagcatcggcgagaacgcccggcgcacctgccccctgattcgccagctcttcatcgacggcagcggctttgcggaccaggcggcactggaacgcaagctcttcgtaatgcgccgggaaatggagcggcgcgtggaaggatgctacgtgtgcagttgttccagccgcagcatcgtgtataagggattgttcctcggcacgcaaattgacggattttacgaagacctgcgccatgagcgtttcaaatctccgctggccctcgtccaccagcgctacagcacgaacaccttccccacgtggagcctggcccatcccttccgctacctggcccacaacggggaaatcaacaccctgcgcggaaacctgaaccatctgagcgtgcgggagccgcacctgtcctccgccctgctgggggatgacttgcagaagctcctgcccctcattcctcccggacagagcgattccgcctgcctggacaacatggtggaactgctcgccgccgccgggcgcgacctgcgccacgccatgctcatgctcatgccgcaggcctggggcgtcaactaccatctggggccggacgtgcgcggcttctttgaataccattccgccctgatggagccgtgggacggcccgaccgccgtcgtcttctccgacggcgtcaacgcgggcgccatgctggaccgcaacggcctgcgccccgcccgctacacgctgaccacggacgatattttcatcctggcctcggaaacgggcgtagcggacattcccgcggaaaaagtggcccgcaagggccgcctgcgccccggagagatgatctactgtgacctggtgaaccaccgtctggtgtccgatgcggaaaccaagaatgaaatggcccggcgcatgccctaccgccgctgggtggaacaaaacaagatttccgtccgctccctgttcgactctgtctccgcctccgcggaaatgccggacctggcggttcatcagcgccagttcggcttcacgcaggaggatgtggaactcatcctccgcccgatgatgatgaagggcgcggaacccctcggctccatggggaacgacgcgccgctggccgttctctccggaaaggcgccgctcctgttcaactacttcaagcaattgttcgcgcaggtgaccaacccgcccatcgaccccatccgggaggaactcgtcatgagcctgaccacgtacataggcaaccatcccaacattctggaggaaacgccggagcacgcccggctcatcaagatggcgcgccccgtcattacggacgaggagctcaaccgcctctgcaacatccgggaagccggcttcccctccgccaggctctccctccagttcccggaaggcggggacggaaaggctctgcgggagacgctggacagcctggcggaatccgccgtggggctggtcaggtccggcgtgcgcatcctggtgctgacggaccgcaacataggccgcggctaccttcccgttcccagcctgctggcctgctccgtggtgcaccgcgccctggcggccgccggactgcgttccgacgtgggcctgatcctggaaacgggggaagcgcgggaaacgatgcacttcgccctgttgctgggtttcggggccacggcggtcaatccgtacctggctctggcgacggtcacctccctggccgcgccgcaggactgcccgctggacgtggtgaaggcctccggtaactacatcaacgccattgacaaggggctgcttaaaatcatgtccaagatgggcatttccaccctgcgcagctaccgctcctcccaattgttcgaggccgtggggctgaaccgggaactgattgacgaattcttccccggcaccgtcagccgcgtgggcggcatcgggctggaggaaatagctgcggaatgcaaccagcgcgccgcgcaaaacgccgggaaggaaggcgggctggatgcgggcggccagtacaagtacaggaagggcggagaaaaccacctctggaacccgcagacgctccaggccttccgcgccgccgttcgcgacaatgacgaacggaaataccgggaatttgcggactacagcaaccaccaggcgcagcatctctgcaccctgcgcggcctgtttgaattcgctcccgcggacaccgtcccgctggaggaagtggaaagcgcggattccatcctgcgccgcttcgtctccggggccatgtccctgggttccctcagcccggaggcccatgaaaccatcgccatcgcgatgaataaaataggagccaaaagcaactccggtgaagggggcgaggatgaagcccgctacgaacccaacgccaggggcgaggtgcgctacagcgcgatcaagcaggtggcgagcggacgcttcggcgtgaccatcaactatctgcgccacgcctccgagctccagatcaagatggcccagggcgccaagcccggagagggcggccagctcccggcgcacaaggtggacccgtacatcgcccggctgcgccattccatgccgaacgtcagcctcatctctcccccgccgcaccatgacatctactccattgaagacctggcccaattgatctacgacctgcggaactccaacccggacgcccgcgtctccgtcaagctcgtctccgaggtgggcatcggcgcggtggccgccggagtggtgaaggcccacgcggacgtggttgtggtcagcggccacgacggcggtacgggcgcctccccgctcaccagcgtcaagcacgccggactgccgtgggaactgggtctggcggaaacgcagcagacgcttgtgctcaacaagctccgctcccgcgtccggctccaggtggacggccagctgcgcaccgggagggacgtcgtcatggcggccctgctgggagcggaggaattcggcttcggcactgccgttctggtcgccatcggctgcgccatgctccgcaggtgccatgaaaacacgtgcccggtgggcgttgccacgcaggacccggccctgagagccaagttcagcggcaagccggaatacgtcatcaactaccttcgcttcgtggcgcaggaaacgcgggaaatcctggcttccttgggcctccgctccctggacgaagccgtcggcagggcggacctgctctccgtgaaccgcgccattgacttctacaaggctcagcatctggacttctcctccatcctgcatgcggcggagggggacggatgcaggtttgacccctcctttgaaaaggaacctctggacaactacgaccggcgccgcctgctcccggacttgaagggcctgctggaaaaaggggaaaagaccgaactcttccgcgacgtccgcaatgtggaccggacggtgggcacggagctatccggagagctggtgatgaaattcggactgcgcggcctggcggaggatacgctcacggtgcacttcaccggatgcgcggggcagagcttcggggcctttctggcgccgggcatcacctttgaactcgccggggaggcgaacgacttcgtagggaaggggctttccgggggcaaaatcatcgtgaggcctccggaaaacatctcctacgctccgtcggacaacgtcattgccggcaacgtcatcggctacggggccacgtccggcagcatcttcctgcacgggcaggccggggagcgtttcgccatccgcaacagcggagccaagatggtggtggaaggcataggcgaccacggctgcgaatacatgaccgggggccgtgtggcggtgctcggcaaggtgggcgtcaacttcgccgcgggaatgaccggcggactggcctacgtgtacgatgcggacaacgacttcgatcagaaatgcaacctgggcagcgtggacctggaaacggtcatgccgcactccgccgacgaggcggaactgctccagctcatttacgagcactacatggctacgaaaagccgccgggcctgcgacctgttaaacaactggccggaggaacgcggcaaattcatcaaggtcttcccggtggaataccggcatgccctggccatgcattcctgaaagaagcatgcagcagttttctgttgtttgggtaagctgggggcctccgcggatgcggaggccctttttttattctttgaagtcttattggtctcattgccggagcgtccgctgaccttttcaaggtagcagattggccctgaaagcaggaatgaagtaagtttctgaaatccgatattaaaaaataactttccatttggttgactttgaatgatgcatcaattatacagaaaatatcataaaaggataatgagtgtcatattcggaaatttatgcagtgctgtcgctatgctgctgattgttatggggatgtggactgaggggggaattgcctttgtccaagtgccggaacaactgccggaatgcccggtgcgcttcatccgcggtaccctggtggcgcaggatggagctatatgggccgtgggggagagggaaagcgtttaccgccttcaaatcggcgacagggcatacgagaagtcgtggctcaacatggattattattccggctttcccaaaggaaagaatttcacctgcattgcggaggacaggcagggccgcatctgggtgggcacggacgacagcggcgtggccgttttcaacgggagggagtggaagacgtatgaccgcggcaatgccctgaacggagagcatgtttatgcgctggccgtctctcccgtttccggagaggtggccgttgccacgtccggaggcgtgtccgtttatgatcccgggaatgattcatggaaggcgctggaccggtctacgggactggtggaagaccaggcggcttccgccggctttgacgccagggggaatctgtggctggcctatgcctgcggcggtatctcgtattcaccgcgcaagtcggggtacatgcagtggaagaacgtgcaggcgccgtggtactgggacagcaagcagtttgcccggcagccgtaccagccgtatggggacgggctgccttccaatatctgcaatgttctggcctgtacggaaaaagaccaggtgctggtaggcacttggtccggcctggcgtacagcaacggcatcagctcctggcactatatgagagggtgcgattatgcccggaaaaacaccggcatttatggctcctcgggacggaagacggccgttccgggtgagggaaatgccaaaatgctgtcggaagacttcgtgtcttccatcctccggcagggaaaggatattttcatcggctaccggacgcagggggtggacgtgctggatgccgaaaggatgacggtgcgccggagaatcaggcagggactggaaaacgttgatgtgtcttctcttctggtactgggggatggaagcgtatgggccggcacatatggacgtggttttgtcagtctgaaaaagggttccctgtcttatcaactggacaggaagcagcaggacgatgaaatcgtgttcccgtccccggcccggatggaggattctgccgcagtcctgaggaggctggaaaagctgggtgcgggcgcgcatgcggggaagagcattgtgttccgcggggaggactggtccacgaagggggactggtgcgggaggtacggcctgacgcgcgccacgctgtgcgccatgaatgcccccatgaacaattccgagtttaaagccaagcaattacctgtccgcatggaaacgagcgctgaagaccctaaatggaaacgagtgtatccctgttattggattcagggactgatggggctcaaccgcaatcagggagatggattgcgctggtgggtacaaagcgccaatgtggcaggaaaccgcaatgttctctttgaccccagtgattccacaagaacagaggcggaatgggacgaccacggggaagtatatccgtcctttgtggacggtcccggtatatgggtagctgtggaagtgccggaaggggttcatgaaatagccctgtatttctataatcccaacggatatcttcaacatgaatccaggcgggattatgtggtagaagcccggaggcatcctttttcttcttccattcaaagcctgttcgacaacaaagcggatattgaaattgggaaccgcactaaaaaagggaagacgcttgccgcttctatggagcagtggcagtcgttcccggtggaagcgcgcacgcgcgtttccaggtttgcggggtccggagtttacaagcgcttcatgtgcaggaaaggcggcgtatacttattccatgtttgcaggaacggttccttcaatactattttaaatggggtattcatcaatgcgcttcttcctctggaaatgagaacgcctgatgaattgccttattatgttgatggattatttgcaggcattattccttcccccgagagagttcatttttctgttgccgggccggaggagaaggttcttctcaatcaactgctcactctccagtatcagccacggtatgttacgcccgcaggatgttcctgcttgaacaggtacattctttcctcattccgtgaggcggttgaaggaaagaaaaagagcaggtgcttggaagactggtttcaatgggaagccagaatttactctcccgatgtacgttcttcttttgaccagaccatggcggctgcgtgggaccagtgtcagatttattatccggatctcagatccagggaatgtgttccgaatgccccgggcacgatacctttttccgtaaatgaagtttatttgatggataagctggatattgattggaggcaatatcgagatgatgccgaacaacctcctgtgaaatcagttcaagagatgaagaaacaccttgaacatgaatcccaaaagaaaacgacaacatgaataataaaatgatattggctgcgggaatcagtctgttgagcatgaacgtgctcaacggagagattaccggggagcataccatgtggtcaggaactcatctgaattatgatggggtttccattattaataagccggcgcttccccaaaagggagtggaagcaaaaaagggtgtaaaaaatgcctacaatattatgccgggtaaagtgacggtgatcacaagcctcaataaaaatcctcaggaaaaacaggaatggctgtacaaaaaaatacatgaagtacggatatccatgactggaaatatatatgtagcgctgatattcgccgatacgaagaatgatgtccccttcgcctatgatcccaataaatttggaacatcgggaaccctttattcacaagtctatatcacggccctgcacaaggtgactaaaatggagaataaaagtgatttcgggaccagcggaaaggatgaagaccctacttttactttagttaagaaaatatgaccggcattccggcggtatgatgcggaggttttattccttatccggaaagggataagacttcaaacaagggtttccgtatggcagcggcccttgttttttagagttggatatatagcaaacaggggctgttccgcaccttgctggcggaacagcccctgaatggagtcttctgttaattcaggaagctcaggccttctttctgcggcgcatcagcagggccgtgaggcccagcaggctcagggtggccgtgccgggttccggtacggccaggccggtgaaggtcaggctgccgttgttgtaggtaacgccgtcccagatcaggttctggccgttctgcgtaagcgtcagcagggaatcccagtcgatgttgtccgccagggatgtgccttcgcccacagtgatcaggtcgatcgtcagggaggtaaggtcaagcgccagggcgctgtccagattcagcgtcaggccgccggtcaggttcagggtggacgttccctgcatgtcgatcagagccgtgttgaagctggagaggttcagcgtggcgttgttcagcgtggctgaggtagtgccggaaagcgtcagcacctggcctgtggaaatcatgggcgcgccggaggcgttgcccatgattactgttgagttgttgatggcggcgttccccgtcaggctgacggtgaggtccttgggagcggaagcgctgccgaggttctggatggtgcccgtctggagcgtaatggcgttggccagggcctggctgttggcgttgagcgttcctccctgcaccaggacggaaccctggccaagtgcggttgcggagttggtctggagcgttccctgcacgatggtggtgccgccggtgtacgtgttgttgccggagaaaacgactacggagctgttcttgttcaccttcacgctcatctggtgggaggagtccttgtcggaaatgacggaggaaatggtgaagttgttgcttccgctggaaccgttggtgaccagcagttctccttcgccggtgatcgttccgccaaggttggtggcgtttccgtaaagggagccggagatggtcacgccggctccggcggcgtcaacggtaatgttggcgctgatgggggtatccgcgccataggcgcggcagttgagcatttcaaatgtggagccggacttcatcaggatatccggcgtgccgcccagtacgatgcctacgccattcaggctcagcttggagttctggccgatggtgatggattcaaacgtgtaggcggtgtcgctgccggacaggttgactgtgccggcgtcaatgatcaggtgtgcgatgtcggaggcatggttggcattgatggtgccggtgccgtccgtcaccttgcggaccgtcagggtgctgtctgcgtgggtgatgggaatgagcgttcccccttcaaaggtgtattccacgtctccggctcccgtcagggtgagggaggaggcggtgtgcgcccaggagtcgttggcattgtagttggccgccgctatggtcagggctccggcgaaggtccagttgggattggctgccgtgagggaggcgttttctcccagagtcagggctcccgtatagcgggaggcggtatctcccgtgatggaaatggaggcgttgtcccccagagtcagggctccggaaccggccaggcccgtcagggtgctggttctgttcatgatgacggtgccggccccgtccagagtagccgttccggacaggctggaggatacggtgagcgtggtgccttctgccgcgcggaggatgccggggcccgacaggctcagggtgccgccggaaatggtgaggtttccgccggtgagtaggatggcgtccgtatggcgcgtttccccgtccgcaatagtcagggctcccgggccgttggtgacgttgatggaagcataggtgccggctccgtcagcggagtccgtccatgcggcatcccccagttgggaggaagtccactcggaggaggaggtgccatccagcgtagcggaaattttaacgccctcataggtattgacgatctggatgcctgcaatgcagccgcgggtgcctgaaccgctggtgttgctcggagcggtgatgctcaggttgggtgaagtctggccttccacatacagcgtattggttccttccaccgcctgtccaaaggttcccgttgctccccacgcggcagagcctgccacggtggaagttccgttccaggtgtaggaaacgccgttgacggtcttggcggagaaattgccgttggcggtgtccgtattgcaataaatgtagacgccgtaggtcaggaaatcaacgccgctgacattgatggtgatgccgctgccgtcgtccaggtagcccttcagcatctggccgtccccggtggagggggtgtcgcctccgcgccaggtatttttactggaccaggtgacggtcgctccggtggcgtctccgttgttatccttcaggttctgggccgtggattgggaagctccgctgaattgattccagttggagccgggaacggcttcaagcccggcgctggaagaatcggaaatggtgccgtttggttcgttggtaccaaaattgatgctgatgctttctccggcagcctgggattgggaggcgagagttccgaagaaggcggctgccataagccacgctgttagttgataaggcaaatgaggttgcatgaaattaatactatagtaatttaaattattccattcaaaattcaggagagaaagaaacccctgcgatacccggttcttatcggattccgaatccgaagtcaacaggaaagtttggtttaaaacatgttagaagaatttggatttggaaaaattggagaaatagcaattaatgaaaaaatgaattaaatgataactatctgacagtcttgatattcatgtgttcaaggcattgcaacggattcggaattcgatgttgatgaatgtccggaaagagcatttttgaaagaagaaaaagcggttggtcgccgcttttgagttagtctcctgcattttttctgtccgggtacaggaagggcggtgtgtcttgggtttttctaaacctgaataatttttataactaacatatattgaatgacttatatatttgactgtaaactgattgtgtggttttttgattggataaaattgagaataacttggaaatggggttgacgtcagcaaaatacgataatattctcacataataatcaggaaataattggttatgttaattaaattcaaacatttcataggaacactcgcattggttttccccctgctggggggatggtccgcaggagaagtcaaatctgtccagatcccggaacaactgccggaatgcccggtgcgcttcatccgcggtactctggtggcgcaggatggagctatatgggccgtgggggagagggaaagcgtttaccgccttcaagtcggcgacagggcgtacgagaagtcgtggctcaacatggattattattccggctttcccaaaggaaagaatttcacctgcattgcggaggacaggcagggccgcatctgggtgggcacggacgacagcggcgtggccgttttcaacgggagggagtggaagacgtatgaccgcggcaatgccctgaacggagagcatgtttatgcgctggccgtctctcccgtttccggggaggtggccgttgccacgtccggaggcgtgtccgtttatgatcccgggaatgattcatggaaggcgctggaccggtctacgggactggtggaagaccaggcggcttccgccggctttgacgccagggggaatctgtggctggcctatgcctgcggcggtatctcgtattcaccgcgcaagtcggggtacatgcagtggaagaacgtgcaggcgccgtggtactgggacagcaagcagtttgcccggcagccgtaccagccgtatggggacgggctgccttccaatatctgcaatgttctggcctgtacggaaaaagaccaggtactggtaggcacctggtccggcctggcgtacagcaacggcatcagctcctggcgtttcttgcgcggccgggattatgcccagaagaatagtaatctgtatggttccgctgcgcggaagacggccgttccgggtgagggaaatgccaaaatgctgtcggaagacttcgtgtcttccatcctccggcagggaaaggatattttcatcggctaccggacgcagggagtggacgtgctggatgccgaaaggatgacggtgcgccagagaatcaggaagggactggaaaatacggatgtcccctccctgctggcgctgaaggacggaagtgtctgggcggcgacgtatgggaaagggcttgtcagtctgaaaaagggttccctgtcttatcaactggacaggaagcagcaggacgatgagattccgttcccgtccccggcccggatggaagaccctgccgcagtcctgaagagactggaaaagctgggagcggatgcgcatgcggggaagagcattgtgttccgcggggaggactggtccacgaagggggactggtgcgggaggtacggcctgacgcgcgccacgctgtgcgccacgaatgcccccatgagcaattccgagtttaaggccaagaccgtgtcgttccgaaccctttcctccgttccgggttatcccggataccagggggccgtgtcttcttactggatccagggattgatggggctcaaccgcaacaagggggatgccctgcgctggtgggtgcatagcatcaaggagaatgataaccgcaacattcttttcgatcccacggattccgtgcggacggaggcggagtgggacgaccacggggaagtgtatccgggctttgtggacggtcccgacatttggaccgttgtggaagtgccggagggcgtccatgaaatagccctgtatttctataatcccaacggttatctttccaatgaatccaggcgggattacgtggtggaagccagaaggcatccttccacctcctccctcgtcttccagttcaacaatgtgggagacctcgcgataggggaacagaacaaatggggaaaaattcttaccgccgccatggagcagtggtattccttcccggtggaagcgcgcacgcgcgtttccagatttgcgggttccggggtttataagaggttcatgtgcaggaaggggggaatctacctgttccgtgtttgccgcaacggttccttcaataccattttaaacggcgtattcgtgaatgaaaagattccgtgggaaatccgcatgccggaggaactgccctattatgtggccggccagctcgcgggcattgttcccactccagagagagtgaacggagccaccctggggcagagggagaaggccgtgtgcaagcccctctatgagctgcaatacacgcgcaagtacctgacgcctgcggcgtgcagccttcagaacaggtatattctctccctgtggtggcaggcccgggagaaccgggcggagggcggctgcctggcggattgcctccagtgggaagccagagtcagtgacgaccgggtaagggcttcctttgatgaaaccatgaagcgctcatgggaccagagccagatttattacatcggcaaccggtcccgggatttcatgcctaatgctccgggcaccgttcctttctcccccagggaactgcgcctcatggccaagctgcgcatcgactggcggcagtaccgggacgatgcgaaaaatcctcctgaaaaaactgttcaggaaatgaaggaattcctcaaaaaggaattattaaaacaacaacaaaccagaaaacaacaatgaacaaaattgcctgtgcaattatggtttctctctcagggacctgcttcctgaaaggggaaatagctccgccggaaacggagtggaaaggggcgcgcctcatttatgaaggggtctccatccagaacgaggtgactctccctcaaaagggggtcatgtaccatgatgaggataaattatccttcaacattacaaatgccaccatcgagatgactaccagcctctccaagaagccgcaatgcggaaaggagtggtgctacaagggcatcagccacatcattatcaaatattgtggtccgatcgccgagcctgatgacggagggaccatctacttcgagccgacctacaatcatcacgtttggtttgataatgacaagtatggacaatggggaattatgttctccaaagtttatatcatcacccgcatcaaaaatgcgaatatcgaggataccaaagactatggcatcagcggggaggacggaagcatctttttccaatacgtggaaaagatgatggctgaaatgtgagctgcgcccggtttccgcggatgaagattatcgtccgctgattccggtcattcaggcgccggaggtctgcaagtgagggccttcggcgcctttttaatgcaaccggaacccgggttgcgcagctccgggtgaaggcggcagcaattccgctctgcttgatggaaggtacgggcttcctgttcgtgaaaggcaccctgtgcctgggaaacctgatgggattgaaaaagaacaatgcctgggaaggatagtccaagcggcagtatcccggttgctgaaacaaaagccggagggcatgaagcccctccggtttttgttgcgggttgattcagcagtttttagggcgcttcacagtacaccgttccgtaggagtcgctgcctccggcccccttgaatctggccttgaccgtgtaggatgccccttgcctggcttccggaacgttcaggatgtactggatatttttctgatcggtaccgctcctgcccgaatgagcgtcccgggcaatttccttctcaccttcatacagggccacggattcgatttcaatggcgtgtgcccccttgtcgtagagcagggtcacggtgtatttgccgggaaccttgaccagtttggtgacgtcgaacgaatgctcctgtccggacaggtcgtcaggcgtccatgtgccgatctgcggcgtgttgaaaaagtcggacttgtctatccggttgatcacatccccggcgtacttgatgcccatcaggtccatgcgcccgctatattccttcaagcgctttttaaaatccgggaaatcctttttcccggcaggtgtccagcccacttccgcaaaggcgcaggcccgggggaatgcctggtggtggaggcgctccgtattggcaatccattccgtccatacctgcgtccccagccccttgaccctggaatggtactgttcctccaggcccgggaaaatgggctcgaagccgtatgccttttgcagggaaattctgccgtagctgtaatcaaggtaagtggagctgtggagggaattgatgacctcatgcccgtccttgatggcgtttttagccaggtccgtattccctttccagaagtggatgacggcgttcgtgtccagtttggttccggctttgcctccgccgtccccgttgacgtcatggccgtaaatctcattccagcccatcatgcggcgcccttttttggcgacgatgccggacatgcggttggtgaagtacatctggacgtccgcataactcttcatgttgttctttttcatgaacgcctcaatttccggaacgtccttccattgctgggcatagcgcacttcatcgccgccgatatggatgatcctgctggggaacagcgccacgacttcatccagtacgtcggacaggaaggcataggtcttttccgaggtagggtcaaaggccgtgttgacgatgaacgtggtgggcacttccctgggtgatttcaagctcaggaacgggtacgctgcggcagccgcgctggcgtggcccggcatttcaatttcagggacgatggtgatattgcgccgggccgcgtattgaacgatgtccctgatctgctcctgggtataaaagccttcatgcggcgtgccgtcggacttgccgctgttccacgtaccggtttcggattccctgcgcctggaaccgatggtggtcagacggggatacttcttgatttcaatgcgccatccgacgtcgtccgtcaggtgccagtgcaggatgttcattttcaacagggccatctggtcgatgatctgcttgatggctttttcaccgaaaaagtggcgcgcttcatcaatcatcagcgcacgccaggagaaccgcgggtagtccaccatgttgaacggagctccggaaatattccactggacggcggatttgtccgccttccggtcgtggaaaatgacgggcatcatctggatcaggctttgcccggcgtaaaaaatgcctttggcatgggcggctgaaagaatgattcccctgggggaggattggatggagtaggcttcctcccccttcgcggccagggccgggtcctttttaatgatgatgcaggcggcattctccggcgcttctccgggcgttttaagggggaggggcagtccggttccttcgccgagcatctgctgcaattgcctggcgcggttcaggaaagccttgtcctgcgtcgcggtaatgatggcggacgccggcgtgagctgggcaggcttcccgtggaacaccgtgatttctgccggtttcgggataatttgttcttgcgaaaatgccgcgggaaggcaggcggacagaacgagcgcgggaataaggaacttcatgaatacggtcttggatacaaatcctgctgacacaatctttcaatggaggtttgttttttggctctggaggctgcatattgttttttccatggtgtcccattttcagaaggcattttatccggctgcgggcggagtatcggcttgcagtaaaaaacggagcgggagtacaacatggaaggatgccgtcctcgtccggatgcgccgccccagaaaacgcctgtccaaccataaatgaatatgaaaacgaacactgcgactcaactattgctggcggcctgtgcgggtgtgctgtcatgccccggcgcctggggttccacgacggtttgccaggatcagtcctactacctgaagacggcctgcccccatcccctttccctggccggccccacggatgaccgggtttatctgcgcttccagacgggatgggccagcaagtacgagtgcgagggtcttgacctgtgggacggctccctgtgcatgttcgttcctgaaatacagtacaaggaatgggtggggaagatatggtacggcgtttccacggaccaccggaaccatgcggaattaaagtaccggctggattacatcaaggagctggggaactggacggtgatgccctggtatgagcacagctttgtttttccgggggacaagggcatcccgcgccccggcctgaagacgacctatcatttttccgaccgctggttcggcggcacggacctctactggcagtataacaaccatacgttccgcggctattacgccgtgtttgcggggttgcacgaggagatcgcggattgcgtgagggtggatgccgtggtgcgttacggctacaacggggggtacgtgggcccggtggtgcaccacggatccaacgccctggattacaacctgagttttaccttccgcgctacctcgcgcctgaccgtggaattgttcaccaactacagccaggcgctgaccgtggtgaagcagagggacctgggggatgatttttattacggcatcaacctgaaatatacgttctgacgcccgggccgctccggtgccgcctgggggcttccgcgcactttcacggcctggcgaactggaagtgcatccagtcgtaattcctctcgcgtcccagggaaaaggccccctccttttctacgatggaccagaaggcatcgtattccggtccggaaaagacggcttccggcgcgctcatgtacagggtattgcgttcggggtccatgtctatcgcaatgccccacgcgtgcagggacgggcgggagcctccgcggatggggcggttgttgaagcagcctccgtaaacgtccagccgcagttcgcggatgcgctccatgccgtaatgttccagcgtgcgctggaaaatcctggtgagcggcacggcgatgaaacggtggcaggtaatggacgcaagctccgtgtctggggaccaggacggcctcagcggatagggcagcggaaccgtaaccagggaggccgggtcccccggctgtccgaagatggaatggccggaaagcacttcccgttccgtgggccagacggaggcgggatgtttgaggccgtacagctggctgcctgaaatgacgcaggcaatcagcagaagcgcctgcttccggaggcgcggggatagccgtggcggaggttgcggcgtgcggtcaggcatgggaaaaggggttggggttcttccggtgtagcaggtttccggcgcggtgcaagacctttgccgggcaggcgccttctccggagggagcggccttccgcgtcttgcggcccttcacggatgaagcactgcaggtattttctgcggcatcgaacatccggaggcgtttttttgtcacaatggaataatattgccgctttgcccatgaattctccatccccccagccccagccgccgccggattccgtctggtacgggtggattttaaggctgttccatcattggaaggtgggggaaaggcaggtcacttacgtgtgggccgtgatcgtgggggtggtgggcgccagcatgtccctgttttttgagtggacggtggaagtgattcaatggctgctcacgggcatctggtcggattcccgcgtaggcaccttttcccaggtggagcctgagtggcgcatgtttattccggtggtgggcggcctggcggccggctgcatcctgctgttcctgaaaaaaaggatgccgggacaggccacggaatacatggaggccatgtccatcggaaacgggctgatcaaattccgggcgtccgccctgaaggtgttttccgcggcatggagcattgcttccggagcggccatcggcaaggaagggcctatcatccagtcctccgccctgatcgcgtccgcggtggggcagcggctgcacgtgtccattccgcggctccggctgctggtcggctgcggggcggcggccgggttcaccacggcgttccatgccccctttgccgggtgcctgttcgtgagtgaaatcatcatcggcaccgtgagcatggatattctggcgcctctgctgattgcctcctgcaccgggttcgccatgctgcacctgctgggggatcccgccccgctgtacagttccccgtttgaaagctttaccgtcttttcccagtccctgtggtgcattgcgctgggagtggcggccgccgtggcggccaggggatgggtcagcctgctggatgtagctaccaggtatttgaacggccgccagtccctcctgccgctgcgcctgatggccgccggactggttgtgggggtgctggcggttttttatccggaggtggtgggcaacgggcaggccctgattaccgggctggtggatgaagattacagcacgcagcaggcgtttatcctgcttctggtgaaggtgtccgccgtggcgatcgtgttcggctgcggtacggtgggcggagccatgacgcccacgctgtatgtgggaagcatggtcgggtttattttcagtacggtcctgacgtctctgggcatggagggcaaccatacggtggcgtatgcgatggtggggatggcggccttttttgccgtggcggcccaggctcccctgaccgcgctggtgatggtggtggagttctccatgagcggggaaatgatttacccgctcctgatcggcgtggtgagcgcttatggaacggggcggctgattcgcgcgcggtccatgtatgccgccagcctgtccggaagtccggaatccgtggtcaacctgcccatggcgcaggtccatgtgcatgacctggctcgccatgtggtgccccaggtggcgccggacgcttccctggacgacgtttcctccctgatgctgcggaatcccggagacctgatttttgtggtgaaaaaggacgggacttatgagggtgccatttatccggatgactttctggctgtccgccggcagatggaggagaaggggaagagccctcctcccaccgccgaggagctgatccgcgcgggcgctcccgtgctggatgccggcacccatctgacggatgccctgaaattgtttgaacagacccatctgcccgcctttcccgtggtctggaaaaataccgggcggctggatggcgtcctgtaccgcaacgcgctgttccaggtcatcacggaaatgatgaaaagggagtccggcggagatgtgggcatgtgaaacgggaggaaagaggcgccatgcattacaattttgtaaacttcttttctccttcgttcataacatcatcaaagttaagtactagaacgttaccttcatttcccgcggcagctttttccccggctgcatgacggtggaagaaaaagtagttggtctgccaggaccgtacggttaatattcgcccagccccggacttcatgaatgaaataaacaagtcaccggatttggaaatggtcgtgctacaggaaatcagctccgccattgtcaatgaacgcaacggcacggcgctgctccggcatattctggacgtgctctaccgccgcatgaagatgctgcgcggcaccttcaccatccgccgcgggaatgatctgatgatagaagcgtcccacggcctggacgagcaggagatgaagcgcggccattaccatgtgggggagggcattacgggccatgtggcggaaacggggaggccccatgtgattgaggacatttcccgggattccaggttcctgaaccgtacccgtacccgcaagagcggggaaaaggtggcgttcatctgcgtgcccatcattcatttgcagcaggtgatcggcaccttgagcattgaccgccccgtggacagggaaacggacctggaacgggaccagaagctgctggagattgtgggcaacatcgtgggggacgcgctggcggccagcctgcaggcgcatgaggaacgggcggccctgatggcggagaacgagaaactgcgccagcttttaacaaccaatccgggcgaactgatcggcaactgccgccccatgctccaggtgtatgaacagatacgccaggtagcccccagcgacgccacggtgctgatccggggcagttccggaacggggaaggagctggtagcgcgcgccgtagtgaacctgagcggcaggaaggacaagccgctggtgacgctgaactgtgcggccatgccggaaaacctgctggaaagcgagttgttcggccatgaaaaaggctccttcaccggagccaccagccgccgcatcggccgggcggaggcggcggacggaggtaccctgtttctggatgaaatcggggatttgagcctccagatgcaggtgaagctgctgcgctttcttcaggaaaagactttttcccgcgtggggagcaacagggagcttcattccgacgtgcgcttcattgccgccaccagccgcaatctggaggaattgatggcggaaaacaaattccgggaggacttgtactaccggctgaacattttccccatcgtcatgccggacctctccaagcgcaagggggacatcatgctgctggcggaacactttctttccaagttcaacctgaaatacgggaaagatatcaagcggctgtccacgccagccatcaacatgctcatggcctaccactggcccggcaacgtgcgggagctggaaaactgcatggagcgtgcagtcatcacggcgcaggacgactgcatttacggttacaacctgcccgcctccctccaaatgcccagccatgacgctccgtcttcccgtaacggagaggatcatgcagacttgccgacgatggtggattcctttgaacgggaattgattgtggccgcgctgaaacgctctccgggcaacatgtccgcagcggcgcgggaactgggcatttccccacgggtgctccattataaaatgcacaggctgggcctgcaaaaatcatgaaaggccttcgtcagcttctgtccgccgtttcccggtccttttatttgagcatgcgcttcctgccccgggagatgcgccccggcgtggccgtgggctatctgctggcgcgcgctacggatacggtggcggataccgtggacatggattgccgggaacgcctggcgctgctgaggatgatgggcgcgacggtagccggggacgcctcccgggaggccgccgcctcctgttttggccgtctgggcattctttccaccgtccagacgcaccggggggaggcggagctgctggcccgtttccccgaatgcctggcgctgctggaagccctttccccccgtgagcagatgctcgtgaggcaggtgctgtccaccattgtggaggggcaggcgtgggatttggaatattttgaagcccgttcctcggtttcatgtcccgaacaactggagcattatacctacatggtggccggctgcgtgggagaattctggaccaggctgggcctgctggcgctggggtcaggcttcagcacgcagccggaggaccagcttttacgctggggcaggcactacggcatggggctgcaattggtgaacattctgcgcgaccgggaggaggacctctcccgtggaagaagctatttgcctactcccgatgttcagccgtggctggaccgggcggaacgctggctgaaggaaggcgtgttttatgcggaatccctccggaacgggcggctgcgtttttccaccgtgctgcccgcatggctggggctggatacgctggaactgctccaacggcaggaacagccggggacaggaaaggtaaaaatcacgcgcgggaacgtttattcccgcatgtggaaggcctttctcttttcctggaaggaagccctgtagcctacgcggcggttttgccgggttccggagcgggcggagtgacaggggaggctgccggggccggattttccgccggggcatccgccttcttctggtcgttcgcgggtgtttccgcaggattgccgctcccttgtttgggcgcggggggagcgggcggcggcttgggcgccagcaggtcctcccactggtggagcttgaaatcctttcccatgccgccgatgtcatggagcagctcctggcatttggctgtaagcttctcgtagtcgggcggtccggcttccggatccgcggaaccggggaagatcaggtagctgactaccaggtcggaaacggggcggctgtaaggccccgccttggggttgatttcacggctcaggcgcagggagccttcccccgtcttgtagcgcggtccggcgtctcccaccagggccgggtacaacttgtcccccacgatgacgacggcgtaatccccgaactgcggggaaaagggagaggattggttgaccactcccagcgggaccacgatgaacggatcgtattccgagatcaggaaactgtaccgcttcaattcttcaatgacccgttccgcgtggtctatcttgcggcgcagggccggtttttccgcggcggaggctttttccagcgtcttcttgtaggaagccagcctctgctgccagggcttgaggaggggattgggcttgtccgtgcgcttcttccagcggtaggaagtgctgggctggtagaaggagcttttcaggattttatccggcatggtggacaggcggtccccgtccgaaccgtcggaaacaacatccatttcactctgtagccagaggagttttctgcccgtatccggataggtggtttccagaatcgtctccgtatcgtagtaattatggcggtccaggagcttgagcagggaggccaggttcttgcggatttccgtctgcttgcggacgtaaatctgcccgtaatagggggagacccgcgcatgcttgaacagggtggacaggccgggaagcatggttcccagcttggggttgatgttcaggatgtcctccttctttgtcagggccttgggctgcttgacgttcagggtgagggtcatctggtaattgcttttagtctccctgtccctggaagccagggtgccgggctggaaattgacctgcgttttcaggttcaggccgcgtgccagttcgtagatattcgtcatggctccctccgcgggcttcgtggggaggacgggcgggaaggggggatactgcaccggagggagggcaatcgtgcgctccggcgtccaaggcgtggtcagccgtgaatcttcaggttcctttccggaaacggatggagtaagggggggcgcaggctcttcctgtccgggctgttccgcagggatggattcatgcggcggataggccccggaatccgggggcgcctgttcgggttcccctttcagggcccggataatctgggccggatacggtgtgaacagggatgccgccatggctgccaggcagatgcagactgcaagcttgaaccaggtgaggcggggtgttccgcggcggtgtgctttcatgatgctgaagaaggtgaatcgttgggggcaggctggactttccgcgggcgcctgcccatgaaaaagcggatcagccccagcggggcaatgctcaacagcagggccgccagccgtatcttcatgccggggaagacacgtgcgcgcccgcgggacagggcgcggaggctgtctttcacgacggtttcaacggacgtgtcaaaggcgttgcggcccggcatcatgtttccggtaaagccggggcgccgggccgcttttccgaagcccgtggaaaccgggccggggcagacggccagcacgcggatgccgtgttcgcgcagttccagccgcagcgcttccgacaggctggaaacataagccttggtggccgcataaacggcaaaatccggaatgggcaggagggctcccagggagctgaggttgatgatgtccccgccgttccgtttcatggaggggatcagcgcatggcacaggcgggtgaggctttccacgttcaggcgcagcagggcgcggattttttcccagcggccgtccgcgaattctccgtaatccccggctcccgcattgttgatcagcagggttctgcccggaggaaggctgtccagatgtgaaacgagcgtgtccagggaagcttcatccgccaggtcgcagggaaagacggaggcgcgcaggccggggtggcgtttttccagcgcggcggcaagctggcgcaggacgtccccgttccgggcaatcagcaccagttccgccgcatgaggggccagcgttccggcaaaggcttccccgaatccggacgatgcgcccgtgatgataatcctgtcgtactggaggcgtggggtttgcatggcgggtgggagcggttcgtatcatggtcaatccggtggggaaccgcaatgaaaaagggggctggagaacgcaaaaaaggcgcacctcctttctttccaaagagaaaagagggctgcgccaaccatggcgcttccccacccggcgaaagcctgcctgcgctctcccgggaatgagggactcccggccctcatagccatgtccggttagtaaaagagaaaaatgagcctaggttcctcttcgaaaagcttttcagtacgaaggccggaaagcctcctccgctccggggggaaggctttgtgagcggaccggctttcatgggaacatggaaccggtggttttcatctccctccttcgggcagacggggactccatgcaccccaacaaaaaaccgcctgccgggtgaacgggaggcggtttgatgaaaaagaagattattcttaggcctggggggcttcttcctgcacctgcaccacgcggaaaggcacgcgggaggccagttcgccatcaaccgtcaggtcgatggagtagttgccgggcttttcaaagcgcaggccctggaagttcataatcaggttgcgggtgaagaaggaggcgccttccgggaaagcgggcaccgggaagttgatcttgatgggcatgcgttccttgtccagcggcgtgccgtcggcgtcaacgatgctcaggcccagttcgtgggtgccttcgtcttcaggagtgaggcagatgcgcagggcaacggcgcagacggggtgcacgacggggaactgacgggcgaccagggagtcaaaaccgccctggatgcaaagcttgccctggtagtcggcggcgaagtcacaaagagtagaaactaaaatatccatgttgtgataatgttgatgtatttggctcgctttcgcatggaaagcatgaacattggacagaactatacttcctccagacctattgcaagataaagctgtagaaaatattgtcatttctccgtgaaattccggttgcgcttgaggtaggccgggaatccctgtactactggttccggcaacgcgttccctggcatgatccgatggttttttgacataccctccaagctgattcactggaggctgaatctggtcaggacgctgggcgcctacgtgccgtggctgcgccgggacgacggttccatgaaagtgcatgccggcacgctggtggacctgtttgccaccattctgagcgggcgccgccacttgagcgcgcgcgacgcggatgccgcgctggacattctgcgctacaccttcccggaagtggagcaccgctggctttccaaccgtttcgagcgttccatgcgggccaatctgacggtggcggatgtgctggcttccgccgcctccggcagggacgagacggagcgcatggcgattgcgctggaagtgctttccctgctcatcaacacgggagacccccgcatgaccggggagctgtttgaccaggtgacgtacggcctggaactgccgggtacggcaaaccacttgaggcagcttctgatgacgccggacgtggaggcccaggagccggcgtacagcgtcggtttttcctccggcattggtgcggaggtatccctgccggaacaggacaagggcatttccttccgcctgatccggtgttcgcgcttggtgctggtggtgaatgacggctccaggcctattgtggtgcgcggccgccacctgccgcccggcggggtaatgccgctgaccaacgggcaggtggtgctgctgccgtcaggtccgctaagctttgaagacttcgcgttcttcctggattgcaagcgttccggcaagcaggaagtatgctatatttccctggacaacggcgccctgcaaatcagccgggtgcgttcacgggccagcgaggtgcgcgtgaacatggggctggcgtgcagggtggaggttctgaggccggaagtggaattcgtggtggacgggcggcgcctgtaccccggtgagaacgtgcgcatggcctactattcctccttcacgctggacggggaggggcctttttccatgggggaggtgcagaactccatgtcggacatcggacgccgcttccgcctggaccccgggacccgcaagctgcgcgtaaccaacctgccggaaaaggcgcgcaagggggacatgctgctgacgccgggtctggccgccggagtggtgctggaggtttccttttccagcgccaccaattccggctggctggaagtggtggaggcttccatgcccctgctgctcaatggcaggcccgtgcggggaagggtttccctgcgcgacggggacgtggtgcacctgaacgcctatcacgccttgcgctgccgtttttccgccggggtgctggatgaagaataccacgccatcagaaccctcagcgtggagggcgtgaccaaggaattcatgcgttccggccgtgtgctggacaacattgacctgaccgtgaagcgcggagagatggtctgcatcctgggccccagcggatccggaaaaagcacgctgctctccatgctggccgggcagcttccgcccacgcgcggctgcatccgttacaacaaccagcttctgtacagcgctccggacctgatccggccctacatcgccttcattccgcgggaggacattctggatgcggccatgagcgtttccgagcacatcgcccaggccaccatcatccgccgtccgcgcctgacccggtcggagcgcgtcaggcgggtgaacgccattctgaaattcctgggactgacgcacatcgcctcccgccgcgtgggagagatgaatgcgcgcaccatttccgacggagagcgcacgcgcctgaacctggggcttgacctggcgggcattgcggacgtcttcctgctggacgagcccatcagcggcctttccacctccgacgccaagctggtcatgcagaccatgctgaacatgagccgtgacaagatggtgatcgccaccatgcaccggcccagcacggccatcctgaaccagttccagaaggtgctggtgctggaccacggcggccagatggcctactggggggacgtgccgggcatgatgcgctatttccggaaggcggccgtggatatggccattgacgtttccgaggaggcgcggacggccggcggcgcggactacgtgtttgaagtgctggaagcccccctttcctggcatgaccgccgcaggcggcagcacccccggctgtggcaggagcgctttgaaggctaccggttccgcaacgtaatggggcaccaccatgaaggaggggcgcccagaacgttgtatgaaggcacgctggaattcccgcctgccccccggcgcagcgtgatgcagctctggcggcttttccgcatctgggccgtgcgcaccttcctgggccgcgtgcggagccgcatggggctgtacaccatgctgctggaagggccggtgctggccctgctgatttccctgaccctgcgcgcctcttccagcccggaatacacgtttgccaccgcccttcacataccttcctatttgttcctggcgaccatcgtggccatgttcttcggcctgaccggggcggccagcgaagtgctcaaggaccgcgccctgctcaagcgggagagcaacgccaaggtgttcgtgaccggttacgtgctcgccaaggcgctggtgctgacggggctttccgccgtgcagtccgccctcttcctgtgggtggggaacgccatcctggaaatccatgaaatgttcctgatctacctggggacgatgaccctgacggccttcatcggcgtgagcctgtccctgctggtctccgtctttgccaaaacggagcgcgcggctctcaatatggtgcccctgctgctgattccccagatactgatggccggggccattgtccactttgatgaaatgaaccagttcatcccgtggtccgcccaccgcacggatgaacacgggcgcctcaagccgggccgcgtgccgctggtggcggaattctgccccctgcgctactcctttgaaacgatggtggtggaccaagcctccaaaaacgtatgggaaagggagcgtgaaaccattcaggagaaagtggacgagctcaaggagcagccccaattggacaacagagaatttgaggaattcaagctgctcaagatggcgctcctgcacatagccgccatcggggcggacgatccggaacaggccaaggccgcggtccggcgggtacgtagggcggcggtcaacggctatgagaaaaactacaggcaggtgattgcggaactggaacagcaggggaagggcaagccctccgttaaatccttttacgtcaatgaccgcattgtaatgctggatgaatccgcggaaatccagcgcgtcagccgtgatacgctggaccgcccggaaattttcctggcgcgccgccagcccctgccgtggggcaacacggggaaggctccggacgatcccggctacagcgcggacgaaggaacggtgcctaccccctggaaggactccctgctgctgttcctgatgggggcggcccccctcttcatcacggggcgcgtgctcaagcggcgtctggaaaaggtcaggtaggttgatcataagatgatgctgcttatgcatgaacgctgctggaagatgcggagaggggtttccgtatttcgcgtgttttgatgtgctggggaagataaaccaggccgtccgttcttttccccgagggctttgagtccgcggaacagcatgaagatgcagatcaatgcagttattttgttgacgttctcccaagaatcactatcttgaaaaaaactcattttccattatgtttgcccgtgtatttaacaagtattctctctcctttttgtctctggcggcagtgtctgccgggctcctgtcctgcggaggcagcggcgatagtggagaaggaacctgtcttccctcaggcagcaggctgaatatggtagtgccgattacggatcaggtgaacccggataacgcctcctctctcatcatccagctggatggcaatgataccgaccttcctctggcgaagattcagggagccgctgccggtacttctattcccgccacgactcacatggtgtacagaagaacgactgcggaaaaagcttctctggtgggcaacttcgtgattgctcagggccaggtcactttgcctggtccgattgtggtgattttctacggctccgttcaggtgaacatggacatcacattcaatacctcttcaaagtatgaaacggccgagggtacgtgtacgggcaacgtttcgttcgtgagcggcattcaggacggagaaggagctattgttgccgggaacccctgggcgggaacggatggcacggtgttctattatcctaccggtaattgagtggcccatgagtcacagtttttatattcaaagtgcggtcgttcgtgaaggatggccgcgcttttttttgcaggaaatatgttgaaaaattggggaaaattatgcctggtgacattttcatgcatgctggcgtcttttttgccgcatggcttcggaacggagactgttccgaacgttcaagaagaagttccggaaacagccagggactgctacatcaatgtattcagggccaaggtcgtccctgagaggatacgttcttttagcatgccggcggacggcatcgtcagcaactggattccggcggacggccgcgttcggcgggataccatcattgctacggtcaatgaggatgaaattgagatggagcggagggagctggaggtcaagattttaaaagaccgtatcgccaaggaggaggaactgtccgaattggagaaacaattggaagaaatgaaattttattcttccctgtccagggaggaaaggcagtatgccagcaaacagccggaaggcggccaacgggcggaaaaatccttgaaggacaagattgaactgaccaaaaaggaattagccatggtgggggacaaggccagattggacttcagcaagaaagaggaaaaatacatccttaaaatgccctttgacggcaagctgcagtaccagttttccttcccgcgggacaacagcgtatccctgtatctggatgcggcggcagccattgctaccgtttgtgatgattccgcctattatattaccatttccatagcggatcctgatttgaccaggctgccgccggaatcattatatctggctgttcccatgagtgacggttccatgctgcgggggaactttgctttcaagcgtgtagagaaaaacacttccagcgggggggatttactggcttattttttccgcctgtctccaaaggatcatgaccgggctcacgccatgctgggttccaattgcacggccaggctctattattctccttccggagaggtgattcgtctcaataaggttttgctggcctccagtccggaaggaaggaaatgttcctcctggcaggaactgcttgaaaaaacgcatccggatatggagctgatcgtaaatggagaaacggaattgattgtacggaaaaaatgaaattggcatgtgaatccgtttatttcagctactcaggaaagcaatggatttttgaaaactacagtaggcttttttcatctggaatcactattttaaaagggtattccggatgcggaaaaaccacgctgctgaaacttttggccggttatctgaaaccccagcgcggaaaggttcttgctcccggccggcgttctctcactgatgctctttatcgcaggaaggaagtaagttacatgtttcaggggatcaatctgctgcctctggctacggtggagaggaatcttcaattgtgtgcggagatggccatgctgcctaaaaaacagtggacacaaagagtggacgacctcgtggagcgtttgggattggaatccctgcgtcacaagaaggcgggcagcctgtccggcggacaggcccagcgtgcggctctggcccgtacgctgatgaaggattcagatattctgctgctggacgaacctacttccggtctggatgacagcaatacggagatcatcaagaaattgatcagggaatacccgtccgataagatatgcattttaagcacgcatgattcccggctctttgacctgactcatgaaatcattgattttaatcagcctgtatctctttaaggatactctgcaccggtggagggaaaggcccgccagcccgctttcccgggtattggtagcgtttttcctctccctgtgcgccctttcgtttcttgcgaattatgttctctctgcaaagatgctgcatgatgagatcaaaagaaacggggctgatctgattgtagtccttgataccgtgcgcgacggtgaaccttccaaaaggaatttgcttcagcatgaattgccttccttgtatggctgcgacgtcctggcgttaaaagatgctcccgcgggattcgcccgtgtgggaaaggcggttttccccattctggaatacaatatggagtcctgcttttatcttgctgatctggggctggaggaagtgcctgtcgtccttttgtttcacccggacaggagttccctgcatccgggaccgtgcagagttgtcatcggggattttgacttttcattgaatgcatccccgttgccggagaaccaccttttagggaaattatatccttcaggagtggtgctggctccggaaggagctttcaataccgggcaggaggcccctataagcaatgaccggtatgtgatcagggttcatgagatgacggcggacaatatccagaatattgaggaaacgcttaataatatggtgcgctatgacgggagcatgacgatggttcagactcatgtgagcatgttgaagaggttggaagtgctgatgagcaaccagatggaatgccggaccggtttttctatcggtattgcggttattgtaggcattcttctgattgccctggcgtctatggaattccggcagaacgagtatgtctatacattgatgaaaagttttggggtgcgtccggctctgctggtgctgacatttattgtggagaacatattcctgataggaatttcttatgccggagctgtatgggcctttatgaagactcaaaagattgtcctgggagaatttttcaagctgggcgatgcggtgttgacgtatgcggacatacggcaggatttgtggcttttgggagtttcacttttgatctgtgtgttgctttcttccgtgccggttgccttctctgcctatcgccctattgggaaagtgttgaagtaagcagtgcgcatgccccatgccggggggtaaataattgttcctccttcgtttgaaaatgcggttttttgatacaaaaaggcctgcggaggaagtccgcaggcctttaaaagtcagagaatgaattctggttatttattgaatttcgtcagagtaccgggccggtcggtaacggcaggatcggcaaaatagggatcagacagggcgcatgtagcggttcctgtgcctttggttacatttttaacgtcggtcatgatcaagtagcaggggaaggcctcttcaccggctctgttggtgtaccagtaaaaagctatttcagcggcggtgtcatcagcgggaacatagcctctgacgtgcatggacgcgacactgggctccgcgctctctccggaatagatgttggcgttgtgtgtggaaacaacgtcaaaggcaaccgtatatacctggttgttttccagggagatttctacattgcgagctgttccgacaggaatatagatttcttccgttttactggagcccccgcaacctgtgagcacggacgtgcacaaaaaggaggggaggagcagagatgccatgatgcaaaaacgagtattcatatagatggaggatattgaaattatatgagtaagacggaaagggatgattagttgctgtaagtaatggtaacgtctgcactgacgccattgagagtttgcatttcttgtcctgcgggctggcgtgaaagcgttcctccttcgccgcctacggatgcatgggtggattggtcaaattccagagcagggaggtccatggaatatgccgtagtattgtttttccctgcaatccagcgcaggttcagagtagctgcattattgcccgtcttgtggtaaatcacggttggagagccattccattcttcaatattctgtccacgggtttgaagactggactgtccgttggtggcggtgatcagttcaaaaatattcgggaaatccgatgccgttattcccagcctgatagataatacggtaccgttgagggtatcgggggcattgccgccgctactgctgcttccgccgcattgcgtcaaaaagagaagtccaagggaacagcaggccagggagattttctgggaaagagggagcataacaaataactgtagataatgtttattgaaggagattgtagtatttcctatgatctgtcaaggaaggaaatttggaaaatggaacccctttcagaaaggggatggaagaggatttcggcttgccattgctgatcttcctccttcctccttttcccggttctgctgtgttggtacttgacttttcagaggcagaagttatgaaacgggcaccagtatgctccttttctcctcggtttgcagctttttctggagtccattcagggtggctcggtggaggactctgttgggtttctgtatttgcgccgttgcatgtacttcctgttccgtggataagcacatggaaagaaaaacggtggagctgatggataaaatggctgccatccccaactgggacgaactgccccggagggaaatctcatgggatacggcaatggccgtcatgatggagggaaatttggatttgaagcgctcggaacaggctctcagggctacggaacgttctgttatcagcgtgtatacccaggtcattccgggcgtgaacctggattggatgctgacaaaagagctgagcgagctgacccgtgtaacagcgcaggatgtagagtataataccaatattctgtttaatatgccgtccctgacgcagataccttttgattattattcggccaaatccgccgtttatacggcccggaaaaccttggagatgaaaaaaagggagctggtgtccaggttgtaccggcaggtactttcctatcagaatgcatgtgtcagccataagaaccggctggatgccgtgccctatgacgatgatggagttcagaagaaattgatccaggatgactgggagaagagagtgagtgaaatttcccagggatttgctgtcctcatggggaatatggatgcccagtggctcgtcaggcctgaaacgatgcccagggtggactggaggaaatacaagagtgcttcccgccatttggatttgctggtggtgaccatggtagccatggaattggaagcttccaggttgcaggttttaaatgccaagatgaagtttttcccgtccgtggatattaatttttacagccctaccttgttttccagtacgggcggcacttaccaggggttctttgcaggcgccggagacatgcaggtgaatatgagcctgcgtgaagaattggacacccggctgacctcctggttccaatacaagacggccaaggaaaatcatgatctgatgcagaaaaaggttgtgatggatttgcagcagaggcgcatcaaggtggccgcgctgatggagagcaggaaaaggtttgaaatctggaagaaagtcattttgaaggaaattgagtttaaaaagtccaggatggctttatcaggcaaggaatatctggcgcaaaggaaggatattaaaaccatgcatgagaatctggatgcggaagccgccaagaatgcggaagtggaagcggcgctcatcatggagtacggctggctgaaataaggggaaggcggagcggccctgtgtgactgcggtgccttcctttcttgatgccttcaaaggcttgtgttacggtccggacatgcaaaaagttcggcagcccgtaggcatggcgttgatgattctggcttttccggccgccatttacggggcgttcccgtggggaatcgccctgggggcctttttgttcctgctgggggtggccgtggcggtcagccgtttttccgccattgtctggtcatggtgcctgttttccctggggatttatctggccgcgccttttatctggatgtggaatccggactattttttcagccgcccgtttgacgttctattcgtgagcggctgtttggtgggcagtctggttctgctgacgatccggtttgcggtagttcccgtgctgtggcctaaaatcttccgccattttgtagagggaagccccacgctggaggacctggctccggagaagggaaggacggtggcggaactgcggaacggcattaaacgcaggcaggtgaatttcctgttcgggcatgcggatgaggaactggtggaaaaatgggggaaaatagcccagggcatcgcggcgctttccaggagccgtaaacggttgacggcttgggtagtaggtattcttctggtctggcccgcagccgtgtttttcctttccggaggcatgggcggcgcgctggaccgtgacattgaccgcatgtgggaaacccgtccgtttcgcaacagcatggtggtttccacccctgcggccatgaatgcggcgcggcgcgttttcaaggatgcccgcgccctgcggggaatgacgatggaacaggcgcgcacgtggctgaaaacggaccgcaggaatgccgccttcaagctcggcaagccccgttacgattttgaaaaggatgaaaccgtgctggtgctttcggacgggcgggattccattcgcctggtggcggtcttcaatgacgccgggcagattacccattcctggccggaagaatacatgaccctgatggtcagggatttggagaaaaactaaatgccggagacaaaggtttgaataggacctttgagctttggtgtttggcccttgcggaacccctgcggatttccgctacagcgtgcgtttttgcggaggcgtcaggttcagcctgccttcactgatgtggatgcccatgccgctttcctcaatcatgtggatgagcggcagataggcctggagcaggttttcaaatgcgggaaggagaaagatcatgtagccctgggggacggaaaggctgccgatggtgccacccacgtggataccccccggcagagtctcgtcattgtagaattcaaagcgggtctgcaccgccatgtagttgtgcgggtccatggactggaagggcgtcaggaacagggaaatcgtctggcgggagtcgatgcccgtatagcgttcaatgatgatttccatgcagccttccccgatggcgccgtccggctgttccttgccgccgtgcagccggatgcctaccgccggattggtggcgaagatggccagggctccgtgctgctgcggatggacggaggaggccaggtagcggttgatgtcttcttccgagaaggaaacggaggcgtccctgttaatggcctgtttcaggattttggggatgtccggagcgttttccttttggcggaagccgggcaggtcagccgtgttctgcgggctccaggaggaataaatcagccaggaaatagccgccagaatggctatggtgaacaggaagatgaggttgccgatcagggagaagggcgttttttcacggacgggtttctcctggccggcctgttcctccggatcgtagaaatgttccacgatgttttcatgttccggcaggtcgtgcagggattccctgccggcggagccgttccgggtggcgccttcgttgtcggagttgggggacatggtgcggaggggttacgggagtctggggaatttggagaagtcgggtgcgcgtttttcgacgaaggcgtttttgccttccttcgcttcctcgctcatgtagtagagcagggtggcgtttccggccaggtccagcaggcccatctgtccgtcgcagtcagcgttcagggaggctttcaggcagcggagggccagggggctgtgccggagcatctggcggcaccaggagagcgtttcctcttccagcttttccagaggcaccacggtattgaccagtcccatgtccagcgcttcccgcgcgtcgtactgcctgcacaggtaccagatttcccgagcctttttctggcccacgatgcgcgccaggtaggaggagccgagaccgccgtcaaaggagccgaccttgggtcccgtctggccgaatttggcgttgtccgcggcgatggtgaggtcgcagacgacatggaggacgtgcccaccgccgatggcgtagccggccaccatggcgacgacgggcttgggcatggtgcggatggtgcgctgcacatccagaatattcaggcgcggcacgccgtcttcaccgatgtagccggcatttccgcgcactttctggtcgccgccggagcagaaggcgtcagggccttccccggtcaggatgaccacgcccaccttggggtcttcatgcgcggcgttaagggcgttgagcatttcatgcacggtctggggacggaacgcgttacggacttgggggcggttgatcgtgattttcgcgatgctgccgtcgtccgttgtttcatacttgatatccgtatattccctggcggtggtccattgtgcgctcatgcggactactttaataaggcgtccgtcaatgggaagcttaaaatgcgccgacttccgggtgtatgcggacttgggcggggggaaaggcggcggaggacgggagcaggcgttttttctgcgttttccgggagacaggctctggaaaagcgtggacggagccgggcggcaatctttttccttcatcccggttttccgctgcttttccggaaggcttcccggtgacggaagctggcggcatttgtaatttacggcatgcgcttctgtgctacattgggaacggtatgatacatgacctactggtgcgcggcgtgacggtgtttcccgggagcgaacattttgagtttgtccccggaatcaatgtggtggtgggcggcaatgattccggcaagagccatctgctgaaattgtgctataccgtagccaagtggagcgcggacgggggcaggaagtccctgccggagaaatgggcggaggaacagcggctccggaaggacctgatgcgggtcttcgcgtcccgcggactggccgggctgacggcacggaaccgcgggaacgcccatgcccatgtggaggcttccatggagggggacggggtgccggaaggcatggggaacctggtgtttgattttcaggcggggcatgaggaggaggggctgagcattcaggagatgcccaaacgcttcctgaacgtgccggtggtgttcctggcggcgcgggaggttctgaccatttacccgagctttgtacaggtggggagcaggttccccgagttcctggacggggggagctgggacctctgccgttacctggacgtggatgcggcagcggaacctatcagcacggacgccgggcgcgtggtcgccaggctggagaagatcatcggcggggaggtggtgaagcgcgacggacggttctttttgcagcgtcccggacagcagccgatcgagatgagcctggtggcggagggcttcaaaaggctgggcacgctgagctacctgatccggaacggttccgtgaaaagagggtccgtgctgttctgggatgagccggaaatgaatctgaacgcctcccatctgcccgtgctggtgaaaaccctgacggggcttgccaagacgggggtgcaggtgattctgtcttcccacagcctgttcctgctgcgggagctgatgattcagctttccgaaccccgcaatgccatggtgcagaggaagtttttcgggatgagcgtgccgcggggagaccgctccggggtaagggtatcctggggggaatccctggaggatgtggggcctatcgaatctcttgaagcggaaatcgagcaggcggacaggtatttgaagctgagctatgagtcataagccgtcagaagctcattacgtggagggagtccaccgtttctggatcgatgaaggctacgtcgtgtgccgcattgaatgctcggattattatgcccggcaggcgcagaatttctgcggggggtgcaaggagatggacttcctgctgtatcatccggaacgccgggatttatggctggtggaggtgaaggactaccgttttgacgcccgtcccaaggtgggggaactggtctgcgccctgagccgcaaggtccgggatacgatgttcctgctccgggccgcttccgtggccgccccgcatgaagagccggcggagggcatttccctgagggatttttccattctggcctcggaggcggaaacgcttcacctggcttttctgctggaaatgggcatgggcggcgtctggacggacggcggcctgctggcaaacgtcaagaacctgctggtgggctccatgcggtttctggatgcggagctgatctgcgcgcccatcacgtatccccaccgcatcggcccgtggcgcgtgacctccgcccacggggaggtgagcaagcgggtggaaatccggcgcgccaggaaactggcggaaattcaggaacagcggcggcgggaacggctggaggcgcaggaggagatcgcctggcaggaaaagagccggaaggggagcggctttcatccggcggaaacggcggaaaagatgccccagtggaagcgccgcctccagcagcgcatgaacggggaaagcgcgaatcacgagggacgacgcagaaaaaggaaacgggactgaatcccgcgctgtctattgcctcattgccggaaggcgcttccgggcccggaacggtccggttccatcctgcgccggctgtatggcatgtctcggaaaaaagttttattttacaaggactcgcgtatcatgccgcccgattcattaacttctgtgtgctaaccacattatgtctgacagaatgccacccagtcctcctcgtcctcccaaatttcccggctccggaaagcccgaatcccccaactggggcgtgtgggtcatggttcttctcattgcaggcgtcctcgcgttcggatttttcaccccggaatcctttggactggggccccgcaaggaaaacctggaatcctttgaagcccagtacaaggcgggccgcgtggtgctgaacgatccgaaggcccccgtggaagtggtgctgagcgagaacggctctgaaggcgtcatccatgcgctggtttataaaaaggacatccagccgaaggtggaaatgaaacccttcgtgctgtcctattccatgtccctgccggaccgcgacaagcccctgctgaacgagctttccggctacaggatggtggaaagcccgtaccggacggaggcggggaaaaatgtttccattattcctgaagaagcgcagaagctttccgtgcccgagttcaaccgcctggctctggaaggccgcatcgcgggcggaaatgagggccttctcctggcggaagacgggaaccagaacgtgctggtcggccagattgtcacccgcatctggcctgctgccacgggggacgcctccgtggacaagcagcgttttgaacgcgtggaagtgccttttaccctggaattccagggagaccgggtcaaacagttgctggggccggatacgaagttcaagcgcgagtccggctcctggggcggcattctgctgaacctgctgcctatcgtgctcattctggtaatcctgttcttcatgttccgcgcgcagagcggcggggccaggggcgccatgagcttcggcaagagtcgggcgcgcctcatcgccccggacaagaacaaggtgacgttcaaggacgtggccggcatcagcgaggcgaaggaggaggtatgggaactggtggaattcctgcgcaatccggaaaagttccgtgacctgggcgccaccattccccgcggcgtgctgatggtgggctctcccggtacgggcaagaccctgctggcacgcgccatcgccggggaatccaatgcatctttttattccatcagcggttcggactttgtggaaatgttcgtgggcgtgggcgcgagccgcgtgcgcgacatgtttgagcaagccaagagaacggcccccagcctgattttcattgatgaaattgacgccgtgggccgtcagcgcggctacggcatggggggcggcaatgacgaacgggagcagacgctgaacgccctgctggtggagatggacggttttgaaaacaactccaatgtgatcgtaattgcggcgaccaaccgtgcggacatcctggacccggcgctgctccgtccgggccgttttgaccggcaggtggtggtgaaccttccggacgtccgggggcgcgaacaaatcctccaggtgcacgccagaaaggtgaaaatggctcccggagtcggttttgcgcgcattgcccgcggcacggccggcttctccggagcccagttggccaacctgatcaatgaagccgccctgctggccgcccgtaagggattgaaggagattacggaagcggaactggaagaagcccgcgacaaggtcagttggggccgcgaacgccgcagcctggcgattaatgaacgcgggcgccgcattaccgccgtgcatgaggcgggacacgccatctgcctgttgaagaccccgcacagcgaacctttgcaccgggtgaccatcgttccccgcgggggagccctgggcatgaccatgtggcttccttcggacgacaagatgcaccagctccggtccgagatgctcgaccagctcgtcgtggcgatgggcggccgctgcgctgaacaaatcgtctttggcgacgtgaccagcggagctaccggagacatcaagagcgccaccagcctggcccgccgcatggtgtgcgagttcggcatgagcgagaaactggggctgatcgaatacggcgaacaccagggggaagtgtacattgcccgcgacctggggacgcgatcccgcaattattccgaatccacggcggaactgattgactcggaagtccgcttcctggtggacagcgcgtatgaacgcgccatgaccatcctgacggagaaccgggacaagctggacatgctgacggaagccctgatggaatttgaaacgctggaaggctcccaggtcatggacattctggaatacggggaaatgaagaatcctcccgccaaggtgaccccgcctcccatgccttcggaggtggaagagcagcccgggaagggtgattccggttcttccgtgaagaaggatgccgaagaagaccgcacggaggacgcggaggaacggaagaaggagagcggccagacggagcaggaccccttttcctacaatcccgtggaggagtacggcaaggacggcgaagagaagaaataatccaatagaaacgaatcaattatggtagccaacgatgcgatggaactggccaggatgtgcgcccgcgccgcggatgacgccaaggctgaaaatgtgcgggtgtacgacctgcgcggcatgtcttccctgacggatttcatggtggtgtgcacgggcttgtccgtcccccacctgcgcgccgtcatccgggagctggaagaatccgtccgggaaaagacgggcgccctccccacctatgtggaagacacgcccgtggcgctgtggtccgtggtggactacattgacgtgatggttcacatcatggggcaggaaacgcgcagattctacggtatggacaccctgtggaaggatgcccccttggtggagtactaacccccggtgatctgaattttccgccgtgcctctgtctgacagcggcacggcttttttatctttccggaggggagggacggcttgttggccgtccgtcggagcaaaggaatcggtgacaggatgtttgcgctcctccgcatgatgggggcctgatccggcccggaagaaaaaaggggcaatgattgttgcgtcagcgcattttctttaccagggatttgggggcgctctccccggtttttccttggaaaagcggcatggcggcccggttctaacaagattccaatcttgccttgcagccgcaatcagattactctttcaccgttatttatgagtaattccggacctacctccaccccgatgatggatcagtaccttcgcatgaagaagggcttgccggaggacgtcctgctgtttttccggctgggggatttttatgagatgttctttgaggacgccaaggaggcttcctccattctgggcctgacgctgaccaagcgccacggcattccgatgtgcggggtgcctcaccacagcgcggaagggtatattggccgcctggtgaagggagggaagcgcgtggcgattgcggagcagaccaccattccgcagccgggcaagctggtggagcgggagctgacccgcgtgatttccgccggaaccctggcggatatgaatctgctggattcctcccgccacaattacatcgtggctctttataaggataaaaagcatttcggcctggcatgcgtggaccacaccacgggggatttttccgtggcccagtttgagcacatggacctgcttctggacgagctgtcccgcatcaatccttccgaacttctggtcagcgacgagcagacggactgcttccccggcgcccatcccacgctttattacgacgggtatacgttcctgccttccacggccattcccaatctgctgagccacttccgggtgcattccctggacggtttcggctgcggggagatgaccgccgctttgggggcgtctggcgcggtgcttcattacctgggctaccagctccgccgccccacggaccatttgcgccgtatttccgtgcgcgccacggagagcgccgtgctgattgaccaggccagccagaggaacctggacctggtggattcccgcggcggcgtgaagctttccctgctgggcaccctggacaggacgagcaccccgatgggcgcgcgcaagctccgggactggctgctccaccccctgtgcgacctggaaaagctccaggcgcggcaggagatgatctccgttcttttgcaggaaccctacctgatgagcaagctgcgggagagcctgaaaaacgtccgggacatggaacggctgacgggccgcatttcccagggcgcggggaacgcccgtgacctccaggcgctggcttcctccctggggcgcattcccgcgctcagggatgatctggaatccctgcccggaagcggggaaatgctggaaagcatccgctcccgcatgggctgctttgacgagctggtggacctgctccagcgcgccctggtggatgagccgcccgtgacgatcaaggagggcggcatcatccgggaagggtaccacgccgggctggatgagttgcgcctggcttcccgcgacgggaaggagtggctggcccagctccaggagaaggagcgcaggcggacgggcattgattccctgaaaatccgcttcaacaacgttttcggctactacattgaagtaaccaagagccattacgacaaggtgcctcccgactaccagcgcaagcagacgctggtgaatgcggaacgcttcgtcaccccggagctcaagcagatggagaataccatcctgggggcggacgaacgttcccgccaggtggagtatgaacagttcctgctgctgcgggaggaagtggggcgccacattgacggcatccagattacggcggacgccatggcggacctggacgtgctgctggggctggcggagggcgcgcagcagtaccagtactgccgccccgtgctggacaattccatgaccctgcgcattgtcaacggccgccatcccgttatcgagcagaatgtttccggcgacgtgttcgtgcccaatgacgcctttctggaaccggaggaaaaccgcctcatcctgctgaccgggcccaacatggcgggcaagagcacctatatccgccaggtggccctgattacgctgatggcccagatcggggcttacgttccggcggagtccgcccacatcggcctggtggaccgcattttctgccgcgtgggggccagcgacgacctggcgcgcgggcagtccaccttcatggtggagatgagtgagacgtctttgatcctgaacaacgccacggagcgttccctgattattctggatgaaatcgggcgcgggaccgccacctttgacggcctttccatcgcgtgggccgtggcggaatacctgcatgacgagttgaagtcccgcaccctgttcgccacacattaccatgaactgacggacctggcccgttccagggccggcgtgcagaattacaatgtggccgtgcgggaatggaaggaggagattgtgttcctgcgcaagatcgtgcagggggcggcggacaagtcctacggcatccaggtggcccgcctggcgggcatgcctgccgccatcgtggaccgcgccaaggccatcctgtcccatctggaaatgaattccacgcggccccggaaaaaggaccgcgcccgtctggcggaacccagggccaagaatacggacatggacgacgatatgcccaccggagagtacgcccagctggagttgttctgatatgactctgcccgcagacatgatcggcggcctgcgcttcgccgccattgattttgaatccgccggggcggcccggggggagacggaccagcccgttcagataggcattgccgcctgtccttccctggaaggggagccggagctgtggacgtcctatatttctacggacaaacccgttttatggtcggcctcccaggtgcacggcattactacggagatgctggcggatgcgccttcctttccctccctgtggccggctatccgttcccgcctgggggacgccgtggtggtgggacataaccccgccacggaacggaagttcctgcgccgctttccggggcacggcttcgggccgtggctggatacgctggcgctcgggaagatgtgcgtgccgggcctgccggattattccctgtccactttgtgtgattccctggggctaaccccctccgtggatgctctgcttcccggccgccggtggcatgacgccctgtatgatgcgctgggaagcctgctcgtcgtccggttcctggtgcgggagctgaagctgtcctcccagcccctggaggtgcttggcagggcgttgggaaagtgattttccttttcccccggaaagattggcctgccgtccatgcgtattacagggaagatgaaagcttccgtttttcttgccgcttttctgctcctgtccctttcttccgtttttgcggagaagcccccggcagggattgtcctggatcccccggacgttcccaggatgaacacgcagcactgggttcccgcccgttacaaggtagtccgggagcagttgctggggaaggagtgcggcatcctgttcgtgggggattccatcacgcagggctgggagcaggaaggcgcggaatggtggaagaaggtgttcctgccgatgaaggcggtcaacttcggcgtcagcggagacaggacggagagcatcctgtggcgcatggaggatacggagctggcagtcaaaacgccgccgcgttactgcgttctgctggccgggacgaataacatcggacggtgggaagggaagcagcccgcggaagaaacggtaaagggcatccgggaagtggccgtgcgcctgctgaagaggttcccggaaacccgtctgatcctgatggaggtgacgccctacggtcccgatccttccgcacccctccgcaagcggcaggaggagatcaatgaacgcctgcgcggtttgaaactgccccggaccaccattctctccattaacggacgcctgttgaatgcggacggaacgttccgggaaggaatgttcagagacaaggtgcacctgaccgcgaaaggctaccaggcctgggcggaggcgctgatgcccctgctgaaccgggaaggctgagttttcccggtttcttgtccgccttgccgttgcttttgtggtccggactggtttccgtctgcggaaaaggccgctttcagcggtccatttccgtttccaggaattccagcaggtaggagggggacaggagttcccgggtgacgatcggctttttgccgggcaggtacagggcgttcacgggaaccgccgtgcgtcccaggtttttgagttcctggtcaatggcggggttcgtgcgggttttgtccgccttcatcatgacaatgccgtatttcctgaaggcggccagcacttcatccgtgtaggacgccttgttgacctggcaggtggagcaccaccgggccgtgaagtccacgtaaacgggctttccctccttcagggcggcctgcatggcttccgggctccagggggtccacacgcttccttccgcctggcgggcgggagccgtagctgcggaggaatccgctgttccggaatccgctccgcggccgaaccaggcggctccttccggggggagcatgtagtacaggccggccagcaggaaaatcacgaagaaaacgccccccgtgatgcgggatttccggctgcggtacatggggcaccatctgccgtacacccagaaggccatggagaacagcaccaggccgaagaacaggaacaggatgtcctgcggatggttgtccgcgtcaaagaacgcaatgtaaatccacaggaagtaggcggcggtgccgaacatcaggaaggacatggactgcttgaaggattccatccacgctcccggtttgggaaggtatttggtcagaacggggaaggctcccagaatgatgtagggcagggacatcccgaggcccatcatggtcaggcagagcacgatgcccagcggaggctggagcatggccgcgccgatggcctgccccaggaacggcgcgctgcacggagtggaaatgaccgtagccagggcgccggaccagaaggagccggcatagcccttctggtgctggaggtcgttgcccatggtggtggccttgacgcctatttcaaaaacaccgaacatgctcagccccatggcgagcatcaggcccagcaggcagaagttcacccaggggttttcaaaccagaaggcccagttcacaacgccttccgcgccgtggcccagccagaattcactgctgaaaatgccgggtcccgcaggggcgccccagtcgaacatgttcgctttcagcgcaatcaggatggccgtaatgatccagaaggagatcaggatgcccagcacgaaggtcagggagtgggccagcacttttttccgttccccccctcccagctggacgaagctcatgatcttgaggccgattaccgggaagacgcacggcatgacgttcaggatgatgccgccgatgaacatgaagaacatgatttcccccagtcccatcagcggcggcgcgggaacgggtccggaagacgcgggggaggcttccgcggctgttgccgccgcctgcgctccctcggaaaaggggcggttgtccgccgtgatgctgacgccttccttccctgcgcgcaggatgccggaaaggctggccagcggttttcctttgtccgcttccggcaggttgttggggtaaaggccgtccgtggtgtcattgtactgcatggccagctcgtagttggagccatccagttttttgaaggtctggggagtggtggggttgatttccccctggtcgcagaagaaataaacggaatcttccggaaccggttgcccgttcgtcctgaggtgcagggtgacggtttttccttcctgggaaatccgggccttcagtccctgcgcccatgcgggggtggaaagtcccgccatgccgccggacagttcggccgcgtcgggggcggcctgtccgtctccgcgtttcagcgtcacgctgaagtctttggtctccggtgcggcgcattgttccgcgcacatttgccacgtcatggtggtggtgaaggtcgtttccgcgggggcgtccttctcaggagtcacgcggaaggccattttcgccttcccgctgtaaccgtaaaaatccacgagtcctttccccaattccggaatttgccagaaggggccttccacccggaagccgggaacggccttgaacgcggcttccatgggcagccctaccgttcccggattcttgtagtagacgtgccagtggtccggcagagtcagctccgtcacgatgacgaagggagtttctccgtaggacgtgactgtagccttggaggttccggatgcctggggcgttccaaaatctcccgcgccgccgaagttcatggctccgaagtcctgtgccgcccccgtacctgctcccccggcaaaaatacccagggaaacggcggcggctttcaaaaagtttctcataacaaaggcggttaccataaagaaaggggggattcaatgtttgtgtgttgcatggtgcggcgccttgtataaaatagggtcatggtaaaaactaaaacgacgtacgagggcggcctccactgctccatggttcatgagccttccggggccaagctttccacggatgcccccgtggacaacaatggaaagggcgagtccttctcccccacggacctggtaggcgcggcgctcgccggctgcatgagcacgatcatgggtattgtggccgaacgcaaaggaattaagctggaaggcatgacggtggaagtgggcaagcacatgaatgctgacccgcgccgcatcggcaagctggaagtggtcatcaccgtgcccctcccagccgatcatccggacaggaagctgctggaacaggccgccctgagctgccccgtcaagcacagcctgcatcccgatattgaagttcccatcacctggaactgggtgggttgacagccgcctgtgttttcttgaggccgcctgtgaaaacaggcggtttttttatgatgttaaaaaatgttggaaaaatgtaataataattgagtgaacttgacttatattgtcaggttgtgcatttttccgggcatgaagaaatttttccctgttttgtgtttggttcctgtaacagtgtgcgggcttttgtgcggatgcggcggcggttcgggaaaatcaggggatgacgggagcgtttccctcagtggtcagcaggtaagcctctttgagggaggggacatgctgttcaggcttcagttcggcggacgggatgtggacgtcatcaagatggagacgagaatcgtgtatgatggggtttacacgtaccggttcaatgaaggcgcagattccggggttttgaatattgtgccggcttccaacagccgcgccgcctgcgccatggcggacgtgaatatttcctttgacgatgctgaaaggagcacgggcgtgattgtctccggaaccgttacggaaaccggaccggacattgatttctccattgacggcgttccgcgccccatggccggctggacgtgccgcgtgcaccgggattgagtttccgcagatcagcagtccaggacgaggggaaagtgctggctgagcgggtaatccgtgacctggatcagctccacgccgtaaaggctggcaatggccggagcctcggacttgtcatacggctcgcagtaataaatggttttaacgccatgggcgcacagcgcctgcatgcatgaggtgcagggcatcgtggtgcatgccaccaccttcgcctcccccctgcggaacaggctgcacaggttgatttccgcatgcagcatgtatttctggcgttcgtcccggctggcccagaaggtgtcctgtgccttgaagccggggtacaggccgttgtaggcggtgccgatcacgcggttgtccgcatccagggcggcagctcccaccttgcggtaggggtcttccgagcgcagggcggccgcatgcgccagcgtcattacatactgcggaatggggaggcgggatgatgagttactgttcatggttggaagactggagttccgccaggaagcctgactcgtccagatacaggttgggcggcagggaatatggggtggggagcgtagccccggcgataacgttggagagggggggattcaggtaaaagcccgggagaaggcgtcctcgcgttctggcccgcatgccgagctgcacggtgccgtcatccagcttgaagacgctccttttcatggacatggccagaatgatgccgcggtccgtggcgaagcaggggcgccacccgatgttgggaagcaccaggtctccggagccgctgaaatcgtaaaacggcgtgcgcgtttccggaaccaggctgtacagccttcggcgcaggaagtcggagcccgtcacctgcttgatgccctccggcatgctgtggtctccgtcgctgatgaggtacacgggggtgctggtgaggatgggccacaggacagatgccaccgtttcatgcacttcgtcatgccccacgctggtgagcagcagttcccggggctggagggagttcacgcgctccaattgctgggcgttcatccagaagtcgcacaggcggctctgggagcgggagctgtccagcagggtggccagccacttcctgagttccgggtggtccgcctccacggtgtcgttcatcaggcattcggctatttcatacccggtgagccgcgcgttttttgctaaaacgagcggcttgtgggcgatgcgctccaggtggttcaggatggtgtccctgccgatgctggcggcaatttccaggcaggtggaggagagctcccgcagggtgttgatgacgatgcgggggttgacggcatcaggcgcaatgggttctccgatggcggccgtgaagcggtaggggacatggaggggggccttggagaagaaacggttgccggagtaggagaagatgctcccccacagctcgtccatgtagatgggaacgatggggcagcgcgattttttcgccagcatttccagccccctgcgcgcggcgcacagggtgcccgtgcgggtgagctggccttccgggaagatgcagatcacttctccggccttgagggcctgaatggccttggacagggattcccggggattccgggaggaaatggggaggcagttgaagagttccagaatccagccgagccagcggatggctacgaattcctccgccacgatgaagcggatgggccgcggacagatgagggaaaggaacagcgcgtccccgtacgtgacgtggttggagacgatgatggctccgccgtcctccggaatgcggtcctggtggatgatgcgggagcggtagacgatcctcatgatccagaggcccatcatgcggatgaattcgcggggaatgagacggaacgccacaatcgtgatgaccacgcccagggcggccagcacccagaattggttctggatggagaagatgttcctgagcatgagctggaagccgacggccaccaggcccatcaggcagtccatcaggttgcccgcggcgatgaccgtgctgcggttggagggatcgcagttgtcctggaggtgagcgttcagcggcaccaggtacgcggcggcgaaggctcccgtgataccgaagccgatgttgctgggcagcgagccaggagcgaagaaggacaggaagatgcagccgatagtgaagccgatcgcgcccagggggatgaggcccagttcaatttttttacggcaaatgatggaggctatgacgccgcccaccaccgtgccgccgctgagccacgccatgagaatggccgcggacatgctgaatccggtgccgtcaatggggtgctcctgggcgatctggagggagatgagcatcagggccccggccaggaaccagaagtaggagacgccgatttcgctgagcctcaggtcccgctgactccacaggtacttgagctgcacgaagtgctcgtaaaagagcttccactcgaatttccgggtctggttggccgggtaccggggaagggacagggccgcaatggctacgggaacggcgatgcaggtgaggatgagcgtggggaaggcggcggcttcccagccgtcgttggaggaaacttgcaggatgtcgaaccagacgaagatgccgatctgcgccgccagcatggacaggatgaggctcatttccatcagcccggaggcgtagccaagctggcgggagcccaccatgtccttcaccaccccctttttcgccgggctcaggatggtcgcctggacggagaagacgcagaaccagaagacggccatttcaatgttctcatacttgtagcacaggaacatggcccccagcaccaggatctggaggaaagacatgaactggatgatgcgggccttgcagaagcagtccgccagccagccgacgaagggggagaacaggatgtagggcagtacgaagatgcaggcaaggatgtactggagggagttgacccaggagtccggcccgtacacggcgctgttggcggccagccagacgcccaggggaatcagcaggaactgggcggctttttcattgaaggcgttctgggcttgaatgagaatcagggaataaaagcccctccattccttttttgagggcatttttttcttagatgtctgtacgtcatccatgtggggcggattgtagcagatcacagggggtagggaaggataatctgtttccgtaccggagcgctccggggaaggcgtgcaggaggctttttcccgatttttggaaaggaaaaggatgcggggacggtggaacggccatggccggacggaggtgaaagcgtgtattcccgcagtgaagcggaggacgcgccaccgggcctgaaaacccccgtggagcgccgcagccccgtacggctttgcacggatgaggggccggaagccggagaatccttgtcatgaagcggttcggcaaacaggctttatggttgacatgaaggtagggggccgtaggatgctggcagaaagctatcacccgaagagagatcatatgaatacttcccagacgataggcgtgctgctggccgcaggcgcaatccttctgccttcctgtgaaacggaacgcgtgaatgaacgccccatcggcatttatcctacggaaaatgtctatccgtccggctccggcgccatgggcgcccagggcagcagcctgttgaatgagattcagcgtgaaaattctctggatccggtagcgggtcagaattccggcttcaatccggatccggcccagaccaattccggcaccatcggcaacatggtggggggcaccaacaatatcacgcctccgccgcccgttgcgcccaagcctgtcgttcccaatcccgtgagtgactctgccaattccggcattgccgctcccaggcccgtggagccctccactgcctcctccattcccgtggcgtggcccacggcggaccccacggtggtggtcagcccgtatgaccgcaccaagaagatcaagattctgaaccggggcaccaacaagccctacccttccggtaccgtcctgcgggacaccaacttcccgaacgagatcaagaagttccgcgtgccctgatgcggccgccgcgaaaagatgatgcccgcgcccctgaacatgctgtatgttccggggcgctggtgtattctaccccctgtgaaaccatgagcgaagcttccagaaaacagctttccttttcctccgtagccattctcggccccggccttctgggcggttccctggcgcttgccgtcaggaagcagctgccgcatgtccacgtgcgcctgtggggcaggagggaggagccgctggaatatgcccgctcttccggagccgcccatgccgcctccacccggttggaagaggtggtggaaggcgcggacctggtcgtgctggctaccccggtgggcgtgatgtcccgcctcgtttccggaatgctccccctgctgaaaccgggcgtgctggtgacggacgtgggttccgtgaagggctgcgtccaccagtccgtgggttccgctctgacggaaaccggcgtggcgtttatcggctcccatcccatggccggttctgaaaagcagggcatggagcatgcctccggggagcttttccgggacgccacgtgcattctgaccaatgacgagcacgtgcatgaagacatgctgctactgctccagcggttctgggagcgcgtgggctgccactgcatccgcatgaaagcggcggaccatgattcttccgtagcccgcatttcccatatcccgcatgccttgtccgccctgtgcgtccacaccgccctggacgggggggatgtgaagctgctggggctggtgtccgccggcggttttcgcgacaccacccgcgtttccatgggggaaccgtccatgtgggcggaaatcctgacggagaatgcccccgccgtcctggaccggctggacgaagccctgtcccagttgggggaggtgcggaaccggctggcctccggagacaaggaggcgctgcgggaatggctgaaggccgcggcggagagccgggcgcaggctcttggcctgtgagaggcgccgggggcgttttgctgccggatgtgcctttgcaggaagggaaaggaacggcctgttatcaaattgttaataatccgggatggacggcccgatgttccgttttatacttgccccatgcgtttatccaacatgaataccccgcgccgccgtcgccaggggcgcggtttgcaccgtgccgccgccattgggagcctgcttgtcctcgggcagtccgcctatgccgagactaaacccgccgccgcagaggagggcgtgcaggaaatgccggaacgcgtgatgaccatccgttccaagtccctgcgggcggagacggtcagttccgccaccctcacgaacatgaagacggaagaagttccgcaaacggtaaacgttattacgcgggatctgatggattccaagggttccgattccctggtggaggccctgcgcatggattcctccgtcaatacgggaggggacatgctgctgtcccgcacggcggaccagtacaccatccgcggttttgccggcaccgatgtgcagataggcaacatgcctcttccccgcggcatgggatacggcatggatacgtccctgatagaaaatattgaaattgtcaaaggccccatcgggtccatttccggcggccagaccagtacgctcggagcatacggcgccggcggttccattaacctgatcctgaaggcgcctgattttgaggaacggacggagttgacggcttacgcccgtctttcccatcacgggcagaagtaccgcgtaactattgacgacacccggtacaggggtgatgaaacggacggttttgccctgcgcacggtggtagccgccgagtatgaacgcccgttctggctgagcaacggagccaacggtggccagaagtacacggtttcccccattttccgctggcagcatgattcccgtaccaagacggtgctgacgaccagtttccagtaccagaattcgccgacgacgatgggcatccccgtgctgggcggccactttgtggggccgtatgacgcctggtacggttctccgagcggaaggctcaattccaaatccctgctggcgatgctggatttcgagcgcaagctggagaaggtctggacaatccgcatcggcggcggcatggggtacagcgatgtggactacaatgtctggggcatttcttcttccgccggacgcggaatgagcacggaggattattacaaccagatgattgcttccggaaaggccaaatacgaagccgcgtggagcgacgagtggaacatcaactggaatttctattccaacgcgctggcggagttcaagaccggacaggtggagcatgaagccctgatgggcgtttcctacacggggagcagcacctatggcgacggttccagcctggtgacgaacgctaccgcgaacacgaacggctatttctccctgtacaatcctccgccctttttccccgccgggcgcgactattccggagccaatgcgacggataccgtggttcagcgggcgggcgtcctgctgcaggatgtccttagctacggacagtggcgtttcctggccggcgtgcgcggggacgcgcatttcagcctggacaacaattacgcgtttgcgtggagccctcgtttcggaattacccgcatgttcggtgagcgcgtagctctgttcgccaatgcggcccgtacttccgcccccaatttcgggtatctggatgaaaacgggaaggaactgaccgattcctggcgtacggaccagatggaattcggcttccgggtcagcccggtggacaaggtgtggttctccgcttcctggtttgacatcatccagaataacactcccgtagccatagacggatataccaaccggtactattcggacggctccaagagggcggaaggcgtggaactttccctgaacggggaaatcaccaagaactggagttcctacctttcctacacctacacccgcaccaagaaccggacctccggggaagtgtatcccaccatcgctccgaatgcgctggccctctggcagaaataccgcattgacggcggcctgctgaacggcacggtgctgggcctgggctaccgctgcaaggattcctactatgccacgttccgcggtgcaaagattgcggataattataccataccttcctacagcgtgtttgacttcacggtggaaatccccctgccggaaaccaaatggctgaaggatgccaccctgaggctggccgtatacaacattttcgacaagaaatacgtgcagtccacccgccacgccgtgcagtgcacggtgggagagccccgcacgtttgaagtaggcgtgaagactaccttctaaccattccttccagccatgagttcccccgtcatttccgtcacccgcctcaagcgcagcttcaagtccggttccgaggacatagccgtgctgaaagacatcagccttaccgtgaaccagggagagttcgtcgccgtcatgggcgcgagcggctccggaaaaagcaccctgctgaacgtgctgggggggctgctgcctccggattccggcacggtgacggtggatgggctggacctcggctccatgtctgatgccgccctgacagtgtaccggcgcgaccgcgtggggttcatcttccagatgttcaacctggtgggaaccctgaacgtggaggaaaacatcctgctgccctccctggcggggggcaaaaaagtggcctcttccactctggacgccatgattgaaaaagtggggctgtcccaccgccggcacgccatgccggatacgctcagcggcggggaacagcagcgggtggcgattgcccgtgcgctggtttccggcccggcgctggtgctggcggatgaacccacgggcaatctggattctgaaaacacccggctcatgggggacctgttccgggatttgcaccgtacgcagggctgcgccttcgtgctggtgacgcatgcgccggacgtagccatgtgggcggaccgcgtgattgtgctcaaggacggccgcatcgtggacgacaggcccacggcggaatttgccggacctgtagaattgtcctccttctatgaacgcacgctgaatgacgccttatgacgctgctgttcaaactgatttggcgggacctgcgcgccaaccccggccgtgtggcggtcagcgtgttcgccatcctcgtctccgtcagcctcattgtctggatgatggggagctatgatacgctggtcaaggagttcgataacgacgcggaggcctacatgggcagctatgacctttgcctggtgccggaggcgcccaaagggccgcttccccccgggcagtacccgcggttcagtgatccggatctggccgcgcgcctggctgcctcccccctggtggaatccgtgaacgccgcctgccaggtgccccgcctccagatcggctgcgggaatgaacgcggcagctttgacgagcagacgcgcgaccgcatggggattcctccgcagagtcccatcctggtggggaaccatgccgtggaatgtccttatgatttgaaggaaggcgtctggccggatatggcttcctcctccgccatggagggggtgctgggcagcggaagcgccaagtatttcagcgcgggcgtgggaaccgtcatgaacgtgcgcgtgggaacgcacgtgtacgacgtgaaggtcgtgggcatcgtcaagcaggccaaagctactcccggcgtcattatgggaccgggcggcatgtccggaccggctttttcctccctctttgtgcccgtaaaggtgtgtgaaaaaatcacgggccagccttttgcccccaatttgatttacgttcagctcaaggaaggggtggacaaaaaggagtttgtggacggcctccggcaggagctggcccaggcctccgccgtggtggcggatacggattccattatccagcggctttccagcgaccgttccgtccgttcccaaaaggagagtgcggagatgtccgtctggctcgtcctgttctcctgcgtcttcatcattttcacgaccctgagcatcggcgtcagcgagcgcacccgcagactggccctgatgcgtgcgctggggatgagccgcatgcagatcgcgctgctgattgtgggagaggggcttttcctgtgcattccggcgctgctgggcggcctggccgccggcttttgcctggtgtaccttctggaggaaggttcttcctcggtccccgtcctgacctggacgacggtgctggctgccgccgcgtgcgccgtggggggggccttgctggcttccatcattcccgcatggcgcgcttcccgccagtctccgctggaagcggccgtgccctcttccggattcatcgggaaagtgagccgcgttcccgtgtggtccgtgatcgccgggctggcgtgcgtgtgcctccagcctgcggccctgcttctgccgggcctggaggtggagacgcgcaagtggatctttttctggctggggtatcccggcctggtggccggtgcgctgttcctggctcccgccttcgtgcgcgtgacggagtgggccgggtcatggatcacggggctgctgctgcgcgtgccgcattctttcctgaaagtgcagctcagccgcaacctcagccgttccgtgggaaccgccgtatccatgtccgtgggcctgtccctctttgtaggggtgcagacgtggggatattccatgctggttcccttctctccggatacgtccacgcccggaacgctggtttccttcctgcatacggagttcaagcctgcggacgttccggagctgatggcgcggcccagcctgcgtaattcgcggatgtatcccatttacgtggatgaaccggacattgccccggcgcagatgaagaccccaggtttttccggaatgcgcaaccgctccatcgtgctggccggcattcccgtggcggagatggctcagggaagccatcccctgttcaggcccgtgttcgtttccggcaacccgcaggaagcctatgccatgctggaatccacccgttccctgctgattccggatacctttgcccggacggtggggctgaaggccggggatgacctgatgctggtgaatccgtcccatcaggggcgccgttccgggaatgctccgtctgccggagctcacggacggggcagaggccccggcatgcagggggaactctggaaggtggcgggagtcgtctccttccccggctggcactggctgaccaagaccagcggcatgcgcgtgcgccgcggcggctttgtggcggccctggcgattgccgatgaacgctggctcaaggaggaatacggccatcaggggttccagttcatctggggggacaccgcccccggggtaagcaacctggagctccagaacgacctgggggaatacgccctgatgaaggtgaggcagcaggagaacgaaggggaaggcgtgaagccgctggtgaaggccctgacccgggaaagcctgggggggagcgtcaccagccgcggtgacgacgtgatctttacgatgagcaagcttcccatcatcatgatggtgattgccgtgctggccgtgctcaatactgttctggcctccgtgcagtcccgccgccgggaattcggtctgatgcgggcggtaggagtgccggccgccatggtgatgcggatgctctgggcggagacgctgatggtctccctgtgcgccgtcgtcatgagcctggccctgggcgtgctgggagcctggtgctccatccagattctggaatacggctatcacttcggcatcgtcactcctcccatcacgatgccctgggcccatctggggtatgcggtgcttctggtgctggccctttcctccctggcgtgccttctgcctgcgtggcgcatgaagcgcgcgtctgtgacggacttgctttccgtccgggaggggtaggggccttctggattatatttgtcgaaaaaagtattgattgctgaaaattaagcaaataggatcagctgtatactttagaatgaaatatttttaccatgaccggaatggagaattgcatggtcctgctgaactggattttctggcctgtgaggtaaaatggggcggtctgcctgatcatttgatgatccgtccagtagatggtgaagaatgggttgccctggcggaggcagtgaaaagggaaacgggaaccggattttatccgaacgtgatgtctgttccgccggaagaggtagccggtctgtcgttttggaagcgtctccggtattattatcggagatcatggagaatggcattcgtcttttccggacgcgcttcccggcgggaatgcctgtccgttttcctgtccatgacgctggcggattgcctggggctggcggttgcccagattctgctggggcttgctcttcctcccctgatgccgggaatcgacgtgttttcctgtttgttcttcatcttcctgctcttgagattgttgctggggttgctaattgtccttcaattctttgccttgtgttggagaaggcttcatgacttgtccctggcgggcggttggtcgtttgttcttccttttgtccttctggctggcagtttgccggtagaatggttgtttggtcgtttgttccagtctgatgcgtggggaatgttcatggcacatgcaggaaaggccggagtaatggcggcaggaggaatgggagtggccgttttcgtgttgtccggaacctgggttgttgcgctgctgggcctgtttcccggtacgaagaaggaaaatcaatacggtcatcccccggaggtatgaccgttccgtttcccggacagagaagaaccggggatttttcccttcgccggaaagggaggataatatcgacaaaccccgtaatgcgtgtttgactgaaagggctttcccgtgaacctgtcttcttccagtcctggtcctttttctgaaaggaagttcagcttgcctgaatggatggcggcaagatggaggtggctgttttcttggtccggccgcatttccagcgcctcatatttatacgcgtggctgttttatggcgcgtgcatggggacgctggttttttcaggatattgggccgcggtgaatgggagtattcatccgcgttttatggtaacggctgagcatggaataaacctggcgtgtttgagtgcggccatgcttgttccatgcctgggacttgtttttcgcaggctccgtgatcttgatctgggcctcctctgggcggttcccgtttacgcggcttccttgggatgtgcggagacgggcttttatcatgtgtacggatgggcgcgggctgcggcgggagggaatgcctcccttttaatttgcggcgccatgtttttctgcatgtttctgttttgtgccgtggcgccgcttgcgctgggatgtgttcccggcaacagccggtccggcatttccgggcgaaccggggaaagaacggaaggaaaggagtgattgtgaaacgttattattaccatacgccggatggggaattgcatgggccgtccgattttgatttcctggttagggaagtccgctatgccggattaccgctgggactgatggtcagggaggagcgttcggaagactggatatggataggagacattccgggagctccgccggaatggaagttgctcaaggagcggtattccggaaccggggaatggatgaaagtgggcaaaatatggaaatgcggcagaagaagtcgttttaagtggtttttttccctgctggtgatgcagtcccgttcctcgcgccgggaagcggctgttacctacggcgcacttctggcgtctgctcctctcgtctggatagtttgtttttgtggagcctgcgatgtttttgaacctcttccttttgggatgctttttgctcttctgtcggggttgttgctgttgtttttcttcttgttttgcttcattgcgctgggcgtcagacgttttcatgatgccgggctggatgggggctggttggcgatcgtctggccggtatggatagcagtcctgatttgttcttttaagggaaagtttctggcaatgtccttttgctgggatcttgtagggggaatatttacgggcatagctgtcttgactgctcccgtcctgttcagtcttttgctgccggagcaaaagcgcaaaaacatctatggagagccttcctggaatagaaaataagtgcatgaaaaagaaaatagaaatcgcttcctggccgcgaaggtcccattacgagtatttccagacgtttgaatgtcccatgttttccatcacgtctcccgtgcgggtggatgccttgtaccgttatgcgaaacaggaggggatttcctttttcgccctgtgcctgtttgtgctgttgaaggcggtgaataagattccccaactgcgccagagggtggaggaaggagaggtgtgggaatatgaatccgtggacgccctggttccggtgctggcggcggatggggaattcacccagattttagtagagtaccgggcggagctggctgattttctggagcatgccgttccgctcattcaggcggccaagcaggctccggcccgggcgaatccctgccatcggacggatattgccgtgttcagctgcctgccgtggattccatttacgcaggtggccagcgcctacagggtgttccgggggcagtaccttcccctcatccattgggggaagatggaggcggacgtttccggcaggctgatgatgcccgtggccattcaggcgaaccatgtgctggtggacggggtccatgttggtaatttttataaaaatattgattgtttttgttgcgggttttaggctgggacgcatggcttccctgttgcgcccttccggcgattaccggtctctgctttcctacagaaaggcggagcagatttatgatctgacctattatttttgtaaggcgtacttgtcttctcgcgacaggacggttgatcagatggttcaggctgcccgttccggaaagcagaatattgcggagggaaaggaggcggggctggtctccatggaaacggaaatcaagctgatgaatgtagccagagccagtctggatgaattactgagtgattatgaagactttttgagagtgagaggctttcccgtgtgggaaaaggattcacgagagtccctttttgtcagaaagaagggtgcggataaatgtctggcccgggattattttttggaactggcccggacaaggcagccggaggtggtggccaatatggccatttgcctgattttccaggccaagtatttattaatgcggcagctcaggtttttggaggggaagtttcttagagaaggggggatgagggaaagaatgagccggatgagaagggataggggtgataggggtgataggggtgataggggtgataggggtgataggggtgatgatgggaattccctataatccctaaagtttcctgtgagccccataggccctattcttcttccaaggttttactgattcccggccaggcatcccggacagttctggactgagtaccccggagatatttccaccagctccggctcccggtccgtcaggcagagttccgggtttccgagggtgtttctggggcggaagctgcatccgcaaggttcctgcatcatgttggggggcagtccgggaatggtgtagaggggagagcctttcgcatggagtccgggaatggatttcatcagggccctggtgtaggcgtgccggggatgttccaaaagctcccgcgccggggcgctttcaacaatgcggcctgcgtacatgacgttgatgcggtccgcatattggcgcaccacgccgaggtcatgcgtgatgaggatgacggaggtgcccatgtcctgctgaagttttctgatgaggtcaagcacctgcttctgcacggtgacgtcaagggcagtagtgggctcgtccgcaatgaggatttccggcctggtgatgagggccatggcgatcatgacgcgctggcgcatgcctccggagaattgatggggataggcgtccatgcgctgttccgcgtccggtattcctaccagggcaagctgttccagcgcgcggtcgcgcgcctcttttttgccggctccctcatgaatgacgaggggttccgccacctgctccccgatggtcaggtacgggttgagggaggacatgggatcctggaagatcatggagatgcgcttgccgcggatggaacggagttccttttccggacaatgaagcaggtccgtgccgtccagcatggcggaaccgctttcaatgcggcccggaggcattgggatgagccccatcatggagtagcaggtgacggattttccggatccggattcccccacgatgccgagcgtttcccccggcgccacgtcaaaggacacgtttctcaccgcccggacgatgccggccctggtgtggaaggaggcgctgaggttcctgacggagagcatgcggagaaggcgggattgtcagtcattgcgcacgcgcgagcgggcagagaagatgaccgggatgccgggagcggggtaggcttccctgattttgttgcgcaggtactgggagtagctgtccgtgagcaggttcttgtcattgacgaagaggacgtagcgcgggacgggaatggtgttgtacttggggtccaccgccgtggtgacgtagtagattttcagtcttctggtggagccgctggcggtgccgggagggttcatctgctgggcaagctggatgaggcggttgagctgtccggtggtgggcaggttacgggattcccggcggatgcgcgtgatgaccttgaagatgatttccacgccctccgctttttttgcggaggtggcgatgaagggcgcatagttgatgaagaagagttccctgcgcacctgttcctccacttccgccatgcggtccttgcgcggggcattcgggtggaagaggtcgaatttgttcacgatgatgatgcagggtttcccttcctccgcaatgatgccggcgatacggcggtcctgctgcgtgatgcctgccgcaatgtcaatgaccagcaggcagatgtccgcccggcggatggctttttcactgcgcatggcggaaaagacttccacggaggtgttccgccgggagcgcgggcgcatgccggcggtgtcgatcagcacgtagggctggccgtcgtgcaggtaggggacgtcaatggcgtcgcgggtggtgcccgccacgtcggagacgatggtgcgcttgtcccggaggatggcgttgaccagggaggatttgcccgcgttggggcgtccaacgacggccaccttgatggggggggcggcgtcctccccgtcttccggttcttcctccagttcttctttcagcggggcgccctcctgtttgaggaagtcgtccagccgggaggcgagttcggagaagcccctgccgtgggcggcggagagaaagatatggtcgtcaaagccaagtccggcgaattcgcccaggttcaggtcctgcttttcatggtccgccttgttgagcaggaggatgacgggaacgtccgacttgcggaggtggtccgcaatgctctggtcaatgggggtgaggtggtcccggcagtccagcacgaagaggatgaggtccgccgttttcatggctatgtccgcctctgccgccacctgttccgcaaagccgtcgctcaggcgcgcgccgatgccgcccgtatccatgattttacaggcgcggtccgtaatcttgcagggggcggagagccggtcgcgagtgacgccgggttcatcatgcacgatggcgatgcgccttccggccattctgttgaagatggcggatttcccgacattgggcctgcctacgatggcgatggtggggacgtgctgcatgcgcgccatgttacccgaagggccggagctgtgaaagctaattccgcgccaacggcgggcgcttccgccgggggcttatcccttgtgcctggcctgattgtgaaggtacagcgccacggcgatcgtgatgacgttgggaagccatagcaggatgtaggggagcatcgtgtcgcttttccgggacaggtccgcaaagatcagggccacaaagtagagggaggcgatcaggatgcccagggcaaatcccgtggaggtgtcttttctgcgggtgttgatggccaggggcacgccaatgagggcaaagacgatgcaggccagggagaaggaggcgcgcctgggcagttccgtggcgaattccgtggtctgttttttatccagatagccgggcgtgttcagggcttccctgatttcccggttggtgaagcggttggccttgatgcgccgggagcgggatttgtccaggttgatgctcaggggcatttcatccatggtcacgctttgggagatggagtccttttcctgcgtggtgatgagcggattgatgaggtgcaggtaaagggtttttttctcgggagagaagtccatggtcacgcgttccgagtgcatggccacggcgggggatttgtcgtccgccttctgatagatgtgcatgccgtggatgacgtcgtccacgcgcttgtcaatgtagatttccagattatcgaatttggtgatggcctgtccttcattgagaagccccttcgggttgatggaggcggccttgatgagcagttcggaaatggattgcttggcgcggggcgcgatgtctatgttgatccagtagcagaggccggagagggcgatgccgatggcgatggcgggggcgctcagacgccacaggctcatgccggacatgcgcatggaggtgagttcgttgtccgaggccaggcgtccgtataccagcagcacggccgtcaggaatccccatggaatggagaacatcagcgagaagggtattacctggaagatgaattccagaacgatgctgatgggcgccttgttttccaccagaagggggcgcagttccttgaacaggttgcccaggagcagcagggcgctcagggccatcacccccagggccgtaacacccagcagctggcgggcaatgtatctgtcaaagatcttcatgcagtaaaaccgtgccggagattttgcccgaaggccgcggacaagtcaatcacgcgcacggaacaatccgtatccttccccggagggaaggaggagttggatgggaggatggaagtccgtgcggctggtgaaaaaggatgcggcatgttgttcagttttctttttgttccaggctgccgagcagtttttcccgctgcgggggaagcttgccgaagtgggatttcagaatgacgtgcgccggaatgccgggatgcgcgatgccgtgcagccgcgcgagttcctgttcaaagtgcaggacggcgcggagggtggggtcgttgttttccagataggcgtatgcccgttgcaggaggtcgtagaattccgggatgggcgtgtccggctccagcatttggagaaacaggcgcgcgaagtagcctgctgcgctgagccggaggtagcttttccggaggggcaggcggggggagagcaggtctgcggaagtcagggagtgcaggtctcccgtttttgcctgcgtccactgcatgcggcactggtagaagaggtccaggcgcccggcaaaggggctgttgggctttctggcgcttttggccgccgttctgatgatgccttcctccgtgcaccagacgacaatcaggccgttctctccgaggggatagagcttcaggaccgtcgcttccgcattcatcagcggcgtttttccagccctgttttagccggttgttccgttgggacggtctgcccgtagggggagggcaggatgccggcttccgtcatggcgtccgtaaaggcctggatggcgctggtgcctccgtggatgcggatggcggaaaggagctgttcctgggcggcgtccttgtctcctcccatgaatttgatgatggcctgggtgcagtagtagtacggcgtgtcgtccatcgggccgtacaggttttccagttccttggccaggggccggttgtccagcttgcgggcgcagatatagcgcttgaattgcagcaggggagtcatgccgggattgtccttgaagggaggcagaagctccgtgaaggctttcagcgccctggcatagtcatgattgacgtagtgcgcttccgccaggttgaactgaatggtgaggttggagggatccagcttctgggccttttcaaagttttccagggccttttcaatgttgcggatttcaatgtagcatgcgccgcggagattgtataagcccgggtttcctgcataaagcttttccagctccgtcagggagaagaggcattccatggttctcttctgcgcaaagagctgttccgccttgcggaattggtcaatgtagctttttctggttgcttccggcaggctgttgaattcctgaatccacgccggggacggaggttccggcggtgtttgctgcgcggaggcggggagaagggcaagcgtcagggctgccagtaggaaggtgcatgctttcatggatgggtcaggaattcaggtggggaatgattttttgtagcgcggcttccgccgtgagtccatatttttttctgaggatgggttccgaaccgtgttcgatgaactggtccggccatgcgatggcttccacgggcgtggtgacgcctccggcttccagggattcaagcacggcggagttgaagccgccgctgatggaatggtcttcaaaggtgcagaccacccggctggaggccgcatgccggcggatgcattcgtcatccaaaggcttgatgaagcgggcgttgatgagggtgaccgtgtgaccctgcgcttccagcagcgctgccgtctcccgggcgatgccgatcatggtgcccagggaaacgagggtcacgtccttccccgtctggagcacttccgccttgccgatggggaggatttccggcgtggagggaagggggaccccggcgccgcagccccggggatagcggatgacggtggggccgttctggtaatggttcatggtccggagcatgtggacgaattccgcttcatccttgggttgcatgaagacgatgttcgggatgctgcggatcatggcgatgtcaaacaggccgtgatgcgtggggccgtcgtccggggagagcccggcgcggtccatgcagaagcgcacgggcagcttttgtagcgcggcgtcatgctggatcatgtcaatgcagcgctgcatgaaggtggagtaaatggcgatgtagggcttcatgccttccgccgccagcccgcacgcaaagagggctccgtgttcttccgcaatgcctacgtcaaagtagcgcttggggaaggcttccttgaacaggtccagcttggtgccgctggccatggcggccgtgatggccgtgacggattcgtcctcgtgcgccatttccaccagcgtggaaccgaagatgtgggagaaggtgggggtggcggttgcctgcgtttcgccgtcccgcacgcagtaggagcccaggccgtggaatttggtggggttgtccagtgcgggctggtagcctttccccttctgggtgaccacgtgcaggataacgggttcgttgaggtccttgatgtaggaaagggtgcggatgagggtggggatgtcgtgcccgtccagggggccgaagtagcgcaagccgaatttattgaagagcagggaggggaagatgaggttcttggtggtgccttccagcttgaaggcgaagtccctggcctgcgtgcctcccagcttttcaatgaaggaggctgtcttgtccctcagccaggagaaggtttccgaggtttgcagggagttgaagtattttgccagcgcgcccacgtttttatcaatggcccattcattgtcgttcagaatggtgatgtagcgcttggtggtctggctgatgttgttcagcgcctccagggtggtgccgcaggtgaacgccgcatccccggctacggctactacatggtagtcctcccctttcagatccctggccgcgcacatgcccagggcggcggaaagcgccgtgcccgcgtggcctgcgccgtaggcgtcatggggggattccgacattttggcaaagccggagagcccttcatgctggcggatggtgtgaatcagcggggcgcgccccgtgagcattttatggacgtaggcctggtgggaaacgtcaaagatgattttgtcccgcggtgtttcaaagacgcggtgaagggcaatgctcagttccaccacgcccaggttggggcccagatggccgccggtgagggaaagggagtggatgagggtgttccggatttcttccgcgagccggggcagttccgattcagggattttcatcaggtctgcatggctgcggatgcttgccagcagctccggaagttcaggtaagggagaattcattgctgtctggttcatcgggatccgttccatcctggacggtctccgggttgctgagggtttggatgcgcagttccgcatcatgaaggatgccgcggcagtggcggatgagcttgttgccttcttccaccagggctatcatgtcttccagttcggtgacgggggcttccgtcaagcgtatgatttcttccaggcgggctacggattcttcaaatccgggagcgtttttccgttgtttggccatatggggaattaaggttgaggggtggaagcggtttcctgaaggtctttgtaaagaatcatgtccgctccctggatgaattggcgggagtccggcgtcccaaagcgttgcgacaaggggtagagcgcacggctgtggtcaaagaggtatacgggattcctgtccttcgtctgaagcaggacggtgccttccagaacgaggggggtgaattccccgtaggaggcggcaatggtgcggaggtccgcattgagcgtggatgagggagtcaccaggatgctgcccaccttcccgccgtggaatttcagaatgcgttccagcaccatgaattgctccaccattttggggaggccgatggctttcctgtctgcgtaccagccgacggcggacggctggtccgtgaggatgaaatccttttccgacgtctgggcgcgaaggtcccggttgaggcctggggggaaataagggggccatgccggaatgccgcggctggccgtcaggatgcccacccgcaccatctggggaaggctgagcagaagggggagggaagtgatgagcagggcgagcagcaggacgccgccccgcaggacggggactacctccttgttggagtgccgtgcgatcaggttgaggacgaaggccgtgccgtaggccgtgaagaagggggcgaagaggatttgaatctgtcccagggaaataccggatttgttggaggtgtaaagggccatgccgatgacggcgggcacccacatggcgaagacgccccatttggcctggttgacttctggccttctgaatttgtgcaggagggccagcaggaacaccatggccaggggaaggttcccgaggttttcataaaggaggtcgccctgcgtcaggatgttgttgacgatagaggtgacggctttctgggcggcgatgggaatgtccccggcggccagggagttcatcgcgatttcttcattgccggtcagccccgtgaagatggtgtaataggccgttccgaagaagcctccgctgagggagcggttgatgtaaacggggtaggccaggaggaggaacaggatcacaagtcccggaatgcagtacaggccgtgaggcttgaagcggatgcccacgaaaatcagaaagccggccatgggccacaggccgatccagccggtgaggcagacgcatgaaaaacagatggagctgtaaatgagcggcatcaggaatttacgcttctcctccctgttttgcagggccgtggacaggaaatggatgccccaggcaaagaagaagagcatcatcatctgcgggaggccgctggtggcgtattgcaggaagaggttgctgagaatcatcgtcaggcaggtgaagctggcgatggtgacgtcaaacatttggtggaggatgtaatagcagctcaggacagccaggatgaagaacatgcaggaaatgcccgccacgatgcggtccggcaggtagatcatggagctacccgtcatgctccacaggtcaaacttgtggacgccggccaccttgaagacggcggcttccaccaggatgttcagaggggcgttgcgtgtgtcccggagggcgtagggattgaatttttccggattgacgagggattccccctgtcccgccagaatggtttcctgttcgcggatctgggcgtcggaaagaaaggggttgaggccggcgcgggtgctcccggagaccatctggatgggtctcagccagttggtggccatcccctgtcccctggccacgttccgggcgatctgggcctggtccatggcggcgctggcggtcagtccgttaaaattgaaaaagtactgcacacccgtaatcgccagcagcaggatgaggatgataataaacggtgtgcgggatgccgtggtgggcgcattcatgaaggttgaatatcttgtaatttgcgttgaagggtgcggcggctgatgcccagaaggtgggctgccgccgttctgttgccgtttgaccgggccagcgcttgttggatggcattccgctccagcaaggataaattcaaaacccctgccgggacaagcccattctgtgtgctgggggcattgtcctccaactgttcctgcgccatgctccccagggcggccggctgctgctgcgcgtgcagccggggtgggaggtgggaaagttctatgctggcggagttgctcatgacgacgccgtgctccatggctgtgcgcagctcccgcacgtttccgggccaggagtagttccgtacggcgtcaagggcgtcccgggaaaggggtttgaattccttgttattctccctggcgaattctttcaggaaggcggtggcgagcaggggcacgtcctcccgccggtcccggagggggggcatctggatgtggaccacgttgaggcggaaatagaggtcttcccggaatttgccctcctggacgagtttcttcagtgatttgttggtggcggcaataatgcgcacattcaccgggatgggcgtgttggagcctacgcgttcaatggtccgttcggacagcaccctcagcaggcggacctgcgttccggcgtctatttccccgatttcatccaggaagatggtgccgccgtccgcctgttcaaagcggccgatgcggcgctgcccggctccggtgaaggagcctttttcatggccgaacagctcgctttccaataactggggggaaagggccgcgcagttgacggccacgaatttattctccggcctgccggaaagggaatggatggcctgggccaccagttccttcccggttccgctttccccttcaatcagcaccgtcgtcttgctgggcgccacctggcggatgatggagaacacgtgttccatggcggcggaccgtccgagcagtttttgcaggccggagtccgcctggatgcgggtggtgagctcctggttggccgtctccaggttccgggtatggagcgcccttttgagcaccagctccacggcatccaggttcaggggctttgtgacgaagtcgtacgcgccctgtttcatggcttccacggcggcgtccacggatccgtaggcggtcatcatgatgctctgggggggatggggcagagaagccgcggctttcagcacgtccatgccgctttccccgcccagccgcaggtccgtcaggaccaggtccggggattcctcccgcaggagagtgacggcctgggaaagattggcggcggtgtacacttcgtaatcgtcctgaaagcccatgcgcagggcgtcgcgcgtgggtttttcatcatctacgatcagcagaacgggcatcttcatgacgggatggaggagggcaggagcctgatggtgcgttccacgcgcggcaggaagaccgtgatggtggttccctgccccggctggctggccagggtaatggagccgccgtgttccttcacgatgcggcgcacgatgagcaggcccaggccggagccggtggacttggtggtcaggaaaggttcataaatgctgcccatgacttccggggaaatgccgcagccggtatccgccacggtgacgaacacgctgtcatccgtataaccgcttttaaccagaatggtgcctccctccggcgggatggactggtaggcgtttttgatcaggttgtagaagacctgcttgatctggacggggtccaggctgaggatggggaggctgggctggaggtccgtgttgatctggatgccgcgctggcggatttccggctccagcagtttcaggacctccatgatgatggtttcaatgttgtggggttcccggatgggcttggtggggcggatggcctggaggaattgtttcagaatgacgtccagccgcgtggtttcgctctctgccgttttcagcagttcttccatgtccgtccggtactccgcgggcagttgttttgccttccgggccaggagctggagatgaaggccgatggagttgagggggttgcctatttcatgggccacccccgcggccagcagcgtgagggcgttcaggcgttccgcctcgatgttctccgcgtttttcttctgccggggcgtttcatcccgtatcaggatcagatggccctggttcctgccgccgatgggggagatgaaaatgttcaggaatttgtgctccggataaaaaatctccacgtcccgggaaacggcggtccggctctgctggatggtgtcccaggtgcagtccctgcccaggaagatgcagaagtcttccggcgtgatctggccgcgttccttgtcaaggagcttgagggcggcctggttgacaaacaggatttttcccttgctgtccagcaggatcagaccttcctggatggcttcaaacacctgctggaaaaaaccctgctgttctgccagctttacaaagaaacgctggaggtcctcttccttgatatggtcaatgcggccgatcagcttatcgatggtgtctttcttcatggcggcgtttccgtccgggctcgcccctatatataaagagagggatgtcacaaatcaagctgatgtgacatattgtcacgcatttgcggctggacatgcttccgggaaaggaggcaggatgaaggcatgcctgaagaacttccctgcatcccctttgtcagaacgcgccaggtagcctttcacgatacggacgcctccggcgtggctcatttcacccggctgctgtgcctggtagaggaggtggagcacgagtacctgcgttcccgggggctggaggttctttcccccgattgcggctggccccgcgtgcatgtggaggtggattacgccagttccgccggtctgggcgactggttgagcattgaattgagcctgggagcggtgggaaccagttcgctggaatggaagtttgcggtgttccattcggagcatccggtcatgagtggaaggtatgtagttgtccgcgtggggaagggggggaaaccgcaggctatttcagagtcggagaaggaatgcctgatttcaggcttttcaaaaggaggggatgcctgtaaataaggcccatgtcttctaaaaagcctgtcgttcttgtcattcgcgacggctggggccgcaatccgttggggcctgatgtcgcgaaagagtacggtgacgccactgttctggctgataccccctttactgattacctcctggccaactatccccacagcctgctgggcgcttccggggaggacgtgggccttccggacgggcagatgggcaactccgaagtggggcacctgaacctgggcgctggccgcgtggttttccaggatctttgccgggtggacaacgccatcaaggacggctccatgggtgaaaattccgtgctgaagaccgctttttcccaggccgccggctcccgcctgcacctgctcggcctggtgagcgacggcggcgtgcacagccatatcaaccatttggtaggcatcgttaaatacgcctatgaagcgggcgtgcgcgacatctgcatccatgccatcacggacggccgtgactgttcccccaccagcggggccggattcatgcgccaactggaagaagccatcaagccttacggcgcgaaaatcgccacggttatcggccgcttctatgcgatggaccgcgacaagcgctgggaccgcaacaagctggcatgggacgccatcgtgctgggccgcggcgaacagtgcacctgttccccctccgaatatgtggaacagtgctacgccaagggcgagacggatgaattcctgaagcccggcatttttgcctacggcaacgaacagcgcgtgcgcgataatgacgtggtgtttttcttcaacttccgtgcggaccgcgcccgccagatgagcgatgccttcctgtatcccgggtttgacggctttgaccgtgaagtgacgcccagggttcattatgtgacgctgacggagtacgatgccaagtatccctcccccatcgtttttgaacaggagcagctggacaacattttcggacagattgtgtcggaagccgggaagactcagctccgcattgcggaaacggaaaaatacgcccacgtcactttcttctttaacggaggcgtggaaacgcagttccccggcgaggaccgcattctggttccctccccccgtgaagtggccacttatgacctcaagccccagatgagcgcggaggaagtggcggacaagtttgtggacgccgtggacaagtacgacgtggtgatcatgaattttgccaacggggacatggtgggccataccggatttgtggaagccggagtcgccgcctgcgaagcggtggacagcgccctggaaaagtgcgtgaagaaggtgctggccctgggcggcaagctgctcatcaccgcggaccatggcaatgctgaacacatgcgcaatgaggacggctccccgaacacggcccataccaccaatcttgtggacctcatttacgtggcggacgacaaggaccagatcagcctctccaacggcattctggcggacgtggcccccaccctgctgaacctgatggggctgaaacagcctgccgaaatgtccgggcattccctggtgacgccgaaaaaataacggttcccgcagttgatctttggaatccgtttccggcttgcgtggctggaaacggatttttttgtctccgtgttgccctgacggaaaaacgccggaaaaggatgcggataagcaatccgtggtcaagcggtgtttccaagggagaaaaacttgcgatgactcccccttgcctatcggaagccgtttgcatggaaagggaaaaccttcggaactgcgtgcccggacgggatgcggcgcaagcctctccggcatctcaatttgaaagggaacgttagcgaaccctcttccctaaagccggtacatcctggcggacgtttgcattccagttccacaaaggactgctccgctccccgtggacaggggaatgcttccccgtctccagtctgtaacggattgcttatccgttggtttccggatatgctgcctgtcaggaattatggattggatctgctgagaattttgttgtgcctgacggtcgtctttttccattacagggggggggaattgcggagggagcgtggctgtggatggcttttttgtcttgagcggttttctggccgttcgatccgccggaggtttcacacaaggaagcatcggggaatattgccggaaaaaggctggcgcctgctgccggtgctgttgattgtctggactgccggtttcgccgttcttcttgttgaaggccagcaggcgacggcgtgggccggagtcacgctgctgatagccgcgccgacacttgcgatgtggaagatgatggggaatgcggcggtctggttcatcgtctgcatcatggcctttctggcgctgtttccgtggctttaccgttattacgggaaaaggccgttcctgtggcttctggcggcaagcgttctttttgctgcgttccggagcggcaccgtgatggactacggcaggctgtattatcaggtgagtttccacctgtggcagtttttgctggggatgtggtgtgcgtcctggaatatggaacagtggaagagtccatggcggtggttttggattggagcaggcgcggcgtggctgctggcttcttccgccgccagccatgaaggaaccggagccctgaactattcattcccggggtacgttgtttcttccgtcatctttgccctgtgcattgcctccctgtggagcgtccgcctgccgtccctgcctgcctccccctgaaatgggcggggattggcgcgggaatgaagtggcgggtggatggccccccagttttattctggggaatcgccttgtgtgtttccctggttatcgcctatttcgtctatcagcatgtggaggtccgccaggtggggaagaggctgaaaaaggcgccggcaacccggaatgaagcttgggaaagagcaggggaaaatggcacggatgaaatatttaggaaaagatgaataaaagacttgtcatgatataaaatcacgttatattggccgtccccaaacgcgccgaaaggcgcaagaaatacgttttctatcgggtttgcctccggaaaaaaggcgcgcttcctgcttactgaaagggatgttcgccttgaatatcggaccagaccgacgaaccacaaccaaagcaggaaaacatgccgaccattaatcagctcgtccgcaagggacgtattactccggaagagaagtccaagtcacgcgctcttcatagctgcccgcaacgccgcggtgtttgtctccaggtaatgacccgtacgcccaagaagccgaactcggctcttcgtaaagtggctaaagtccgtcttaccaatggtgaagaagtgatcgcctacatcggcggtgaaggtcacaacctccaggaacactctatcgtgctcgttcgcggcggtcgtgtgaaggacttgccgggtgttcgctaccatatcgtccgcggggctcttgactgcctcggtgttgacaagcgccgccagggccgttccaagtatggcgccaagcgtccgaaggttgccgccaagtaaacattaacatcttacctactatatattatggcccgccgtaaacgcgtctatagaaaaatcgaacgtcgtgacccccgttacgacagctctcttgttggcaaactgatcagcaaggttatgctggatggcaagcgctcccttgcggaacgcattgtttatgccgccatcgacatggctaacgaaggcacggacagcattgatcccctggaagtgatcacccgcgccattgaaaatgccaagccccgtgtggaagtgaagagccgccgcgtaggtggcgccacctaccaggtgcctctggaagtggacccggcccgttccgaatccctggccatgcgctggattgtgaactacgcccgcaaccgcaagggcgtgccgatgcacaaggctcttgccaacgaaatcaaggaagccgccaacaaccagggttcctccgtccgcaagcgcgacgacgttcacaagatggcccaggccaaccgcgcctttgcccacttccgctggtaatcccttcagcgactgtcagccgaaccattcactttcgatcattacagatactttccagacactatgtccgatcacgtaaacaatcccaatcgcaaggctccccttgagcgctaccgcaacatcggtatctccgctcacattgacgccggcaaaactactttgtccgagcgtattcttttctacaccggcatgatccacaagatcggtgaaacccacgacggttccaccactaccgactggatggagcaggaacgcgaacgcggtatcaccattacctccgctgccgttaccaccaactggaagcaggtgaaaaatgaaggtatcagcaaaatgttcgaaggcgaaaacttccagttgaacattattgacacccccgggcacgttgacttcaccgctgaagtggaacgttccctccgcgtgcttgacggcgccatcgtggtattctgcggtgtggccggcgtgcagccccagacggaaaccgtatggcgccaggccaccaagtacagcgttccccgcatgtgcttcgtgaacaagatggaccgtaccggcgccaacttcaacaacgtgctggacgacatccacaacaagctgggtgcgaacgccgccgccattctgatccccatcggcgctgaagaccagctccgcggccagattgacgtggtgaaccagaaggctgtcatgtatgccgacaacgaccgtctgggctccacctacacggttgaggaaatccccgctgaactcaaggaagaagccgaactggcctaccatgaactggtgagccgcgtggccgacgtggacgacgaacttgctgaaaaggttctcatggaagaacccttcacccccaaggaactcaaggaagccatccgccgcgccaccatcaccaacaagttcatccccgttgccggtggttccgccttcaagaacaagggcgtccagttcctgcttgacgccgtggtggattacctcccctctccggtggaaaccgttcccgcccacgctgaaagcacgctggatgcggaagaaaccttcaagattaccgctacggacgatgccaagcccatggttctggcattcaagctctgggctgacaagtttgtcggcaagctggtgtttatccgcgtgtacgccggcgtcctcaagaagggtgacaccgtgtacaacccccgcacccgcaagacggaacgcgtgggccgcatcatccagatccaggctgaccagcacacggacattgacgccgtatactctggcgacatcgccgccatcgtgggcctgcgcaacgtgaccacgggcgacaccatcaccagcccggacaacgatgtctgcctggaaccccccaccttcccggaaaccgttatttccatggccgtggaacccaagaccaaggccgaccaggaaaaaatgtccaacgctctgggccgcctgtctgaagaagacccgaccttccgcgtgaagaccgacgaagaaaccggacaaaccctgatctccggcatgggtgaacttcacctggaaatcatcattgaccgcctgatgcgcgaattcaaggtggaagccgacatcggcaagccccagatcgcctaccgcgaaaccatcactgcccccgcccatggcgacggcaagctggtcaagcagtccggcggccgcggccagtacggccacgtggtgattgacgtgaagccgaacgaacgcggcaagggcctcaccatcgaaaacaagatcgtgggcggcgccattccgaaggaatacatgaacgccgtctatgccggcctcaatgaagccatgaccacgggcgttatcgccggttatccggtggtggacgtgcacgttgaagtggtggacggttcctaccacgaagtggactccaacgaaaacgcattcaagatggccgccatcttcgccatgaaggacgccttcaagaaggccaagcccatcatgctggaacccatcatgtccgttgaagcttccacgccgaccgactaccagggcgacatcatgggtgacctgaaccgccgccgcggccagatcagcaacatggaaaacaaggccaacgcctgcatcctgaaggccatggttcccttgtccgaaatgttcggttattccaccgccatccgtaccctttccagtggccgcgcctcctactccatggagccctcccactttgaacaggtgcctcagaacctcgttgaccagatcgtcaccgagaaggctaaataaacaaacctttgaagtataaccaatagaccgcacgtccatgcaaagtccaaaaatccgcattcgactccgcgcatttgactcccgcgccatcgaccgctcctcccaggagatcgttgaaaccgccaagcgcaccggagccaaagttcacggcccgatcccgttgccgacccgcattgaaaaattctccgtgaaccgttccgttcacgtcaacaagaagtcggctgaacaatttgaaatccgcacccacaagcgcctgctcgacatcgtcgacccgaccgcccgcacgattgatgagctcaagaagctcaatctcccggccggtgtggacatcacgatccgcatctagtttggtacccggataagtaattaaaaaacagaaagacacactacaatggctctaggacttatcggaaaaaaggtcggcatgacccgtctgtttgaccaggaatccggcgctatggtgcccgtgaccgtcattgacgtaaagggcaacaccttcgcccagatcaaaacggaagacaaggatggctacaacgccattcaggttgcctttgatgcgcagaaggaaagccgcgtggccaagcctcaggccggccacttcaagaaactgggcatccagcccaccaagctcctcaaggaattccgcgtggaagcttccgaactgcctgctgaaggtgctgaagatcccggcgtggacctcttttccgccggccagtgggttgacgtgatcggcacttccaaggggaagggcttccagggcgcgatgcgccgccacaacttccacggctctcccgccgcccacggttccatgatgcaccgccgtaccggtggtgtgggtggctgttccacccccggccgcgtctggaagaaccagaagatgcccggacagatgggcaatgccaagcgcacggtacagaacctgaaggttgtggccgtacgtccggaagacaacgtcattcttatctccggcgccgttcccggtgcacgcggttcctacctcgtgatccgccccgccaagaagaagtaaggctttagttaacctcacattgattataggaaaacctatctatgtccgcaaatacctttacattagaagccgccgctgccgccaacatccagcttgtaggcagtgacaagggctcccaggccgtgcatgacctcatcgtggcctaccaggcgaaccgccgcaccggttccgccaactccaagacccgcgctgaagtcagcggcaacaacaagaagatcttccgccagaagggcaccggtaatgcccgtcacggcgacaagcgcgctcccatctttgtgggcggcggcgtggtcttcggtccccgcccctgcgactacaccaagaaggtgaacaagagcacccgccgcctggccctgcgccgcgtgctgggcgatctgatcgccgcttccaaggtcagcaccgttgccgaattctccgtggccgacggcaagaccaagtccttcatcaaggccgtcaaggatctgacggacgccaggaaggtgctcatcgtagccgcttcctttgacgattccacctatcttgccggccgcaacgttcaggaagttctcctgatgaccgccgcagaagtgaacattgaacagctcatgaacgctgatgcagtgatcctcgttgacaacgctttagaaaccctcgccagccgtactgcttaagaagccatgaaagacatttaccaagtcatcaagaaggtgcgcatcagcgaaaaggccaccatgctccaggaaaccactggcgagctggtccttgaagttgaccgcgacgccaacaaaatcgaaatcaaaaaggctgtcgaagtcgctttcggcaagaaggtcgcttccgtgcgcaccgccaactatgacggcaagctcaagcgtcagcgccgtgctgatgcaggtcgcaccgctcattggaaaaaagcttacatcaagcttgccaacggtgaaacccttgacctcgtttaaagccccctactaggaaggaaagctatcatgtccctcaagtcattcaagccagttactccctctaaccgctacaaggtgtggccgtcctttgacgaaatcaccacctctaccccggaaaagagtctctgcagacccctcaagaaatccggtggccgcaataacaacggccgcatcaccacccgccacatcggcggtggccacaagcgcaagtatcgcctggtggacttcaagcgcaacaagtttgacgtgcccgccaccgtgcttaccatcgaatacgatcccaaccgcacctgccgcatcgccctgatcgaatacaaggacggtgaaaagtcctacatcctggctcctacgggcctccaggtgggcatgaaggtggaaagcggccagaaggttgctcccaaggtcggcaatgcgatgcccctgaagaacgttcccctgggtacctccgttcacaacattgaaatccgtccgggttccggcggcaaggttgcccgtgcagccggccagcaggccattgtttccaaccgtgaagcaggttatgcgctgatcaagatgccctccggcgaaatccgccgtttcaatgaggattgctactgcaccatcggtcaggttggcaatacccagcacatgaacgaaatgtccggcaaggccggccgcacccgctggatgggcgttcgtcccaccgtgcgcggtatgacgatgaaccccgtcgaccacccgaacggtggtggtgaaggcaagtccaagtccggcggcggtcgtcagcacctcaagtctccgtggggccacgtcaagggccagaagacccgccgtctccgcaagcccagcgactccgtcatcgtacagcgccgcaacgccaagtaaccaatacacaataactttaactaggatcatataacatgggacgttctctcaaaaaaggcccttttgtcagtcaaaagcttctcgccaagatcgacgctcagcttgaaaccggtgaccgcaagccgatcaagacctggagccgcgcatccatgattacgcctgacttcgtcggtctgaccttcctggtgcacgccggcaagaactttgccacggtgtacgtcacggaaaacatggtaggccacaagcttggtgaatttgccccgactcgtgtcttcaaacagcacggcggtatcggtaagaagtaatcagtaagttaacaatcaacatgtcgaactcttcttccatccttgcctattcccttaccacccttgtagggctgggcgggatactgcagggagcggaagaggatacggcggcactgacgcgcagaatcgagcgtctcgaaaagcagaatgcggccctcaaggcatcctatgtccaggcccgcagcgacgccgacaaggcggccgcccagctggtggacatccgtacccggctggaagctttgggaggcgcagcgctaggtaatagtgaggaacgcctgattcaggcggtggcagacatcgaagcctccaatgaccgcattcagcggctggagcaggcgtccgtcaagctctccggagccatcctcgcctacatgaaacaagccatatccgaggacgcaaatgcaaggacggcagtggaaagctccctgcgcctgctggagtccgttctgggatacaggcaacagcccgtgcgagatggcgcgggaaccctggcggaagccaaggtgctcagcattgactccgaatccggagtagtggtgctgaacgccggcagaacggcagggatgcaagtcgggatgcccgtacaggtgacccggggagcgcaaaccatcggagaagccgtagtcacggacgtccgcaaggaagtatgtggcgcgcttgttcagaaacttgcggcgcccgccgagccggtgcgcgtcggagattctgcctcagtaaaaaccaacgactaaatcatcttcatcaataacctgcactacgaggaaaaacccatggaagtgaaagctgtttacaaatacgcccgcatctctgccaagaagatgcgcgatattgctcaagaaattcaaggcttgtccgtctcccaggcgaccgacatcctgtcctacacccccaagaagggtgcctacctgctgaataagacgctcaagtccgccttggccaacgccgagaataatgcggaactgtccgttgacacgctggtggtcaagtccgtcatggtcgatgaaggccccacgatgcgccgcacgatgccccgcgcccgtggatccgccaacatgatccgcaagcgcacatcccatatcaccgtcgtactggccgatcaagaaggctaagtcattccaatctaacacacatatagctgaactaatatcatgggtcagaaagtaaatccaatcgggttccgcctcgccgtcaacaaggactggcgttccaagtggtacgccacgggccaggattacgccaccaagctgcatgaagacttggtgatgcgcaagtacatcaaggaacagttgatgtccgccgccgtctccagcatcgtgattgaacgcgcctggaacagcgtccgcattaccgtccacaccgcccgtcctggtcttgtcatcggccgcaagggtgaagaaattgaaaagatccgccagtacctccagggcctgtgcggcgcttccacccaggtcaacattgacatcgtggaaatccgttcccctgaaacagacgcccagctcatcgctgaaaacgtggccgtccagctggaacgccgcgtttccttccgccgcgccatgaagcgcgccgtgcaggtagccatggaacgtggcgccgacggcatccgcatccgctgcgctggccgtctcggcggcgccgatatcgcccgtgccgaatggtaccgcgaaggcaaagtgccgttgcagacgctccgcaccccgattgactacggtttcgccgaagcccgcaccctgtacggcatcatcggcgtgaagtgctgggtcaacaagcgcgatgaagtcgtctcccagcagacctcacgcccgtccggcccccgcggtccccgtcgtccgcgtgcctaagaaagccgccatcacattgttcatcacacttaacacaaggaggaataagatatgcctttaatgcccaaaagagtgaagcaccgcaagatgcaccgcggcagccgttccggcaatgccaccagcggtacctatgttgcctttggtgacttcggccttcaggtgctcgaccgcggttggatcaccaacaaccagattgaagcctgccgtattgcgatcaaccgttacctgaaacgtaaaggtaaggtgttcatccgcattttcccgcagaagtcctttacgtcccgtcccccggatactcgtatgggtaagggcaagggcgccgtggaaggctgggtggccgttgtccgtcccggcaacattctgtttgaagtaggcggcgtgaccgaatcccaggcccgtgaagcccttcgtctggcttccaacaagctgggcgtgccgacccgcttcgtctatcgtcaaggcgttcaacactaaagctactcatcaccatgtccgataagaattcccccaaagaacttcgtgctatgtccgccaaggagctttccgctctggtgcgcagccttcgtgaagaactcttcaatctccgtcttcagcaggccaccggccagctggaaaacaaccagagaatccgcactgtccgcaaggaccttgcccgtgcccttaccattaagggtgaaaccggggaagcgtaagctgaggatttccggtaacaacagaacattctaacacttttagaatccaatgtccgaacaaaccgaaacaaccaagaagcccggccttcgcaagacgcgcgtcggcgtggtgacctccaccaagatggacaagaccatcgtcgtggaatacgttgcccgcgttccgcaccccaagttcaagaagatcgtcaagaagagcaagaagttctatgcccatgacgaaaattccacggccaaggtaggcgataaggtacgtatcgttgaaacccgcccgctttccaagctcaagtgctgggaactggtggaagtgcttacccactaatcaggaatcaaccattaaataaaggagatttgataccatgatccagatggaatccctagtccaggtggccgacaacaccggcgcccgctccgccaagatgattggcgtcatcggcaagcgcacccgtcaggcccacattggcgacattattacctgccacatccgcgagtccattcccaccgcttccgtgaagaagggtactgtggtgaaggccgtggtggtgcgcaccgccgccccgatccgccgtgatgacggctccgtgctccgctttgacggtaacgccgtcgtcattatcgacaaggacaacaacccgcgcggcacccgtattttcgggccggtcgcccgtgaactccgtgaaaagaagttcatgaagattgtttcccttgctccggaagtgctctaaccgagacacctcaggattttgaacgccgttctctgaagagaggacggcgtttttttgttgcccgtatttttccggtgaatgtgtgtttgaggcgtttttcatgagaaacaataaagtcaccggaactacgagtttgccgggcgtctgggaagagagtccggaatagtttatggggcaggttttttcctgtttttgaaacgtcccgatggattcccgtgtttccgagttgggaacgtgtttttacatcgcacggcatgaagatgtcgatacgggtttttcaggcggaagggaggcaagggcctcaggcggtctgtctgagagaatgtcttggggcgtgccgggagccaagagacttgagatgcgcccgttccgcttccgggcaggggatgacggcggaagatgcgggaaccgctgatagaaggccatttcagagaattcggagagggaaggctgtttgtcccgtctgaatccggatttggggcccagggatagggcaaagagcgggaaacgcgttgttcgggattgctgttcttgctgccgccggacaggaaaggagcctttttccgagcgttacgcgcaggagaaaggccgggagatcccggggaggccaaggcggagggggccacgcgcacgctagtgtttgtgctgttccgcgcgggttttttccaactgctgggaggaaccgcaggccgggcaccggaaccagtggaagaggaatatatgcagagccgtggcaaatacgtagccgaagagggggatgcgatgggccgccttgttgcgggtgtattttttaaaggagaagacgtgggcgcggcatacgctacatttccggggcaacgccagggaaagatacaggatcagcgccagaaaccaggggccgaagcataggctgatgattaaccagcctcgttccccgttgagaagcacgagggtgatgattgcgatggaaaagagggtgcagacgaagaggaggaggacggaggcggctcccagccatgtccggaaaggagtcatgtgcttgacgccctttttgcgcaggtaggtttttggctcttgccggacatggacgcgcttggcgggctggtagctttgttcttcctggcgccttgccttggtggagagatgtttcgcagggccgtcggcacgagggcgtggccgtttttccctgccgggtccggatgtccgcggagttgtcttcaccgccggagccagttccaccacgggagtggcaagcgggaggcttccgtccgtggaagcgtgcagtgcagccggttccggcgctgtgggcattgcaagcgcctggttcacccattccctgaaaacgggagccggaggtatttccgtgcgcagtttcagcatccgttttgcctgatggagttcaggcaaaacggtgaaagggtccgcggaagcgaattgttcaagagtacgtatgcccaccgcttccagcaattcaatgaattgctcacgaccggcaaagtactgttgaaggtcattcattcccggaagaatagatgattaggaaagggaatcaagcatccctttcagttgggcctgttttgcctcccaatccgccagacgggctttttcctggtccacgacttccgccggggctctttctacaaagcccgcattgcccagcttggaggaggatttggcgatttccctggcaattttgtccagctccttgcccagtcgttccttttccgcttccacgtcaatgagtccttccaggggaaggaagagctctcccagcggcgtgagggccgcaggcgttcccttgggggcggagtaggcagcgtcccgggtgacggatttggcgtttgccagaatggacagccggaagaggatgtccagcgggacgtcatgggtggttttcaggatgaagctgacgtttttgttgttggagaggtcgtattccgccttcaggttccgggccttgttggccgtttcatagagagccgcagcctgggtgttcgccagcgtgatgcgggtttcgtccagccctgccagaagaccgtccgcggaggggagcggggtgcgcatgagcggaaggccgccgttggcgtccgcaaagcccagggaagcccagagttcctccgtgatgtgcggcatgaccggatgcagcagggccaggtagtgcctgagcaccgtgtccatggtggttagcgtggccgcccgtgccgcagggtccgctccgtccctcaaatctcccttgacggcttccaggaagcggtcgcagtattcgttccagaagaattggtacaggttctggatgagggcgttgaattcgtagtccgccagcgctttttccacatctgcatggagctgcttgagcttggagatgatggagatgtgcacgggggagtagtgcggcgcagcgtcttcctccgccgcgccctgcatcaggcggaagcgggtggcgttgtaaagtttgttggcaaagttcctgccctcgccgatctggttttcgtcaaagcgcacgtccgtgcccgtgggggcgatgcgcatgaggccgaagcggaggccgtccgcgccgtagttggcgatcaggtccagcgggtccggggagttgcccagggatttgctcattttacgtcctattttgtcgcggatgatggacgtgaagaagacgttgctgaacggcttgtcatgctggaagcggtagccggccatgatcatgcgggccacccagaagaagatgatgtccggtcccgtgacgaggtccgtggtggggtagaatttggcgcgggtttcgtcatccatggtggagaagggccacagccaggaggagaaccatgtgtccatcacgtcgctgtcctgagtccagttttccggatccgcgggcggctcggttcccacgtagaggaagccttgctccagggcggaggcgtccagagcaggggcgttcctgagttcttccgccttgtccttccggtaccagacggggatgcggtgcccccaccagagctggcgggagatgcaccagtcctggatgttttccagccagtgggcataggttttcgcccagcgcgcggggcggaaggtgatgtccccgccggccacggcgtccgccgcctccttcacgcacgggtatttgaggaaccattgcatggagaggcgcggttcgatcgggacgttggcgcgttcggagaagcccaccttgttgtcatagtcttcaattttgaccatgaggcccgcggcttccagcatttccacggatttccggcgcgcgtcaaagcggtccatgccgtgcagttccggcacttccgtgcagttgatatggccgtcgggggtgaggatgtctatgatttccagattgaatttccggcctatttcaaagtcggccttgtcatgggccggggtgattttcagagcgcccgtgccgaattctatttccacgtattcatccccgatgatgggaatgggggcggcgttgagcgggcgcatgacgtttttgccgatgaggtgggcgtaccgcgggtccttcgggttgacggccacggccacgtccgccatgatggtttccggacgggtggtggctacgtgaagggctccggagccgtcttccagcttgtagaggacggtgtaaagcttgcttttttgctccgtcatgatgacttcctcatcggagagggcggtgagggaaacggggcaccagttgaccatgcggcggccgcggtagatgaggccttcccggaagaggtcaatgaatacctgcccgacggctttggtgtattcctcatccatcgtgaagcgttcgcggtcccagtcacaggagcagcccagcttgtggagctggttgatgatgatgccgccgtgtttttccttccattcccagactttttccaggaaggcttcacggcccaggtcatggcggctctttcccgtcgtctgcttgaggtccttttccacccgtacctgagtggcgattccggcgtggtccgtgcccggcagccacagggcttcatatcctttctggcgcgcgcggcgcaccaggatgtcctggatggtgttgttcagcacatggcccaggtggagcactcccgtgacgttggggggaggaatgacgacggagtaggcaggcttttcagaagccgggtcagccttgaaacaaccttcttcaatccagcgggattgccatttttcttccactagggacggatcatatgctttgggcagatcagacatgggcaaaagggtaccataaagtttttttctttcaatccctacctgccctgggatgggtggaaaaaccggctctttccgccccaggggcagcagtatgaaaaagccgccggctccctggcgggaaccggcggcctgagcggagttttttcaggatttatttgaccgtcacggtcgtctgggccggcttgaggccgttggagatgacctggagcgtcacttttccggattcacccttgcgggaacgcagaatgacctgggcaagaccgttgaaggccttgattttcatgatgtttttgttttccgggttcgccatggtggtgaagtccgtgggatcgccgttgcagatgccggcaatgtccgcggggccgcttaccttgaaggtgagctggtttttgctgcggggcaccatgcggccctgcgcgtcgcggacggccacggtgacgtaggagaggtcatagccgtctcccttgatttcactgcggtccggcttgagggtgagcgccgccggttttccggtggtggttaccgtgtccgtagcccagggcttgccgtcttttttgacgacgactttgagggtgccgggcgtgtatttcacgtcttcccacacgaggcggtagcggtctttttcaccggtgccctttttgcggacgccctgggatttcccgttgaggaagagttccgcttcatccccgctggtgtagacatgcacgggcgttacctggcctttgcgttccggccagttccagtgcggcaggatgtgggccattttgacatccggcctccagtgggcctggtagatgtagaagcggtctttcttgaagccgcacaggtccacgatgccgaagtaggaactgcgggagggagcgcggttgcccagcttcttgagctcggccatcagtttttcacgttccggaccttccggcacgttcagggcgttggtggcgtccaggttgtacggggtgggttctcccaggtagtcgaagcccgtccacacgtattcgcccgcgctgttggggttgtcgtcctgggcggcgaattccacgtccgggcggtaggcccagccgggggcgtagaggtcataggagctgacctggtagaggaagaagcccttgctcttgttccagtccacggggaagaagtattctccgcgcgtgctgacgcaggaggaggtttcactggcgtagaagggctggtccgggcgatccttggagaaggccttgtacgcccagggcttgtagttgtagccatagacgtccatcgtgtccgcgaagccgttccgggcggccccggcgtcattgcagccggccgtcaccttgcgggtggggtcttcccggtggaagaggtccgtgaggttctgggagacgctatgcaggtttttgttgccctgttccggcacttcattgcccgtgctccaggcgatgacgctgggatggttgcggtcccggtggcagaagttgaccaggtcgcgttcatgccattcgtcaaagtagttgtggtagtcctgcccttttttggcgctgtgccacatgtcgaagagttcgtcaatgaccaggatgcccattttgtcgcacaggtccagcacttccggcgcgggagggttgtgggacgtacggatggagttgacgccgaattccttcaggatttcaatctggcgttcatagccgcgcgtatgggcggctccgcccagcggccccaggtcatggtgctggcagacgcccttgagctgcacgcgctccccgttgaggtagaagcccgtgggcttccattcaatggtgcgcacgccaaagttcgtgagtttctggtcaatgaccttgtcacccagcttgaccgtggttttcatcttgtacagatggggggcctcaagcgtccacagggtggggtttttaagcgtcagcgtgctggtgaccttgcctttttccccggcggggatcgcttcccccctggtggtggttgtggccactaccttgtcaccgtccagaatttcttccgtaacggagggggtgacggccttgtccgtggtgtttttcaccgtggtgtccacttccaccttggcggaggatttagtgatttccggggttttgacgaagacgccccagtgttcgatgtgcacggggttggattccgtgagccacacatggcggtggatgccgccgcccggataccagcgggaggagttggggggattgtccaccctgacggcgatggtgtttttctggccgaatttcaggaagggcgtgatgtccacgcggaaggagccgtacccgtatttccattcgccggccaggtctccgtttacatagatttttgggcgggacatgatgccgtcaaaatccagatagaattggttgcccttggcgtccgccggtacttccagcgttttgcggtaccagccgatgccgtcccacgggagtttgcctgtttcattgggaaggtccatgcggtatggcccttccacaccccagtcatgcggcaggttcagggaacgccagtttttgtcgttgaaaccggggctggagggatggtccgctttgctggctccggcggcggcctgcgggcggatgatttcccccttgtcgtttttaaaggtgatttcacggatgctggcccagttgctctggttgttgcccgtgacggtgacgcggaagtagcgaggcttgccggttttgttttccaccgtgtcttccttggagtcgttttgtccggaagttttgtcttcaatggtcgtccagcgttttccgtcaccggagccttccagcttgaaaagatggttgttttgtttttcccacaggatgttgacggttttcacgtccacggggcgtcccatgtccacagtgattttctccccgcttttgccgccgtcggcacaccagcgggtggacttgtccccgtccacggcattgtccgccggattgccggattcctcactggtggcagtggcgaatcccatggcttttcccggttccggctgtgtgctgccatccggcatttttccgaaacgggcaaatttccagttccaatccaggctctccgttttggtggcgtccaggggcgccgccatgaggctggcgatgctgaacgcagtaatgcagagggtcgtgcgtgtaatgttggtgaacatatctgtggtattacgactggaaatctgcaatcttgcaagatttttattcagcagaatgcggtttctgcacggattccgtcagcagggcttcacgtatccggcgggatgacttgcagccgccgtccggttatgtatggaggcgtcttccggaaatatggttgagaggaagctgcccccggtcaaagaaagaggacgaatgaatcggttggatggactggaaccgggggaatgaaaaagagaatgccggaccggccttgttgaatgggccggtccggcaacgggggaaaggggagaggcgggaggaactcagatgtacaccttgacgatggcttttttccggaggcgttccacccattttttatagcgttcattgctgcgcttgttgcgcgccatcatgtcgatctgctccttgatggcggaaagtggcggaggaggggccagttcctttttttccaccagcacgatggtgaagccggtggagtccaccagcggcccgatgatttcgccgggctgcgcgccaaagatgatggcggcggattccggggagagcgtggagcgctccgtgacgggccaatcgccgcctttttccgcatagaggtctttggagtaccgcttggccatgtcttcaaaggtggcgtttttggatttgatttccttggcgatgagttccgccaggttgagctgcacttccggcgtggaggcggagtcgtcccccagcatggggatgaagattttcttgaatttgattttgtccttggtcaggtcccggtattgttccttggttgcctcgtattcctgccgtatttcttccggggtgggcggtatttcctggtcgtatttggaggcgcgcatgatctggacctggagctgttttttcgtcatttcccggaaggcgcggatggtcatgccggagaggttgaggtttttcaggaaagcggagcggtcaccgttgaaggtggtcaggatggtgcggttgatttcctggtcaatgagggagtcgcggatgacgccgcccatgccttcgaattcgttgcggagcagttcgcgctccaccaggtcttcaatgatgttttttttcgccagggcgagctgtttgtagaattcgggaccctgtttggggtactgggccgcgagttgcgcgccgatgggcatgagccgcacgctgacttcattggccgtgatcgggcgaccgttgacggtggccgctatccggttgacgatgcgctggggctgcatgcgggaggccggcgcttcgttcggggagatgcgcttggattcgtccggacgcaccgtttctcttccttcatccccgtggagctgaacggcccggggaagggaggcccgggaatccacgatgctttgcgcctgtgcagataaggccatggtacagatgagaagcgcctggatgtgggttctgatattcatggaggggagaaaaagaagctttaatgtttccggatgatagggaacagccctgtaaagacaatctatttctgggtatgtatggataccgccctgcatggtagggagggccgtctccacacttttgctgactgtggatgtgcttggtaaatgccgtttttccctatacagtgtgcgccgatgcatgattgccgtttattgaggggagtgatccgttcctcccgtccggccaatattcccacgctgttcaccaatgcggccgtggcgtgggctgccgtccggggagcggagctgccgcctgccggcctgtatgcgggcgtggtgctgatgggggtgtgcttttatttgtacggcatgtgggagaatgaccgtgtggatgccaggtgggacgcttcccgttatccggaccgtcccgtgccgtgcggcgcggtgagcgtgtccgtgctgaggctgctgtccctggtggccgggctgtccggcctggtgctgaatatggcgctgggcggggagtttgccgcgggcgctgtgctgctgatcgtgatttccctgtacaatatgtttcacaagttgtggagcggctccgtttttctgatggggctgtgccgcgggctgtgggtgctggccgccgggctggtgtttgcccatgcggccggggaacccgtgctgcccgcgtccctgctgtggtatgctttcggcctgtttgcgtttacctgcctgatttccatggtggcccggcgtgaagcgggcaggccccgggttcaggcggccgtggtgctgctgctttccggcatgtgcctgtttgatgcggtatggctgttgtgcctgggttccctgctgtggatcggcgccgttttattgtgggccggaacgcggctgctgcagaagctcggctgccgggctacataggtttggattgaatttacatggaaagtgtgcatcatctgacgcgagaaagtgggttatgaatgaattgatcatcaagatagggccgttgttctgggttttaagcattctggccgtgtacgcgctggcggttgttgcggagcggattttatatttccacaggattcagattaataccggggattttttaaggggcatttccaagctggtgaatgccggaaagacggatgaagcccggcatgaggcttccattctgcctggcccggcggcccgtgtggttgcctccgtgctggcgcatgccggattgcggcgtgaagagctccggaccgtggcggaggattccgtgcagatggaggtgttccagattgagaagaatatccgcggcctcctggtggtggctacggtgagtccgctgataggcgtcctggggacgattcaggggctggtgggtttttattcccagccgggcctcctggaagggaaggcccccaccctcgccatgtcggacgccgtttaccaggccctgctgagctccgccctggggctgagcattgcgattcccgcttatttgttttattcctacctggcttcccgctcccgccagatcgtgcattccctggaacgggccggcacggaggccgtgtgcctggtgtgcgacgcccgccagaggcgcgaggagggagagagcatggccggacggggagtgtaagcgtaacagggaaggaaaaaaggcatgcagatcaagacgcgctcaacgttgcccaccggggcgtttttcatgcaggtggtcgtcctgctggatttggtcgtgcttgtttgcgtgctgacgatcatgacttcccgcgtgggaatggcgtacgggtatgaggtgaaggccccgtcctcccgtttcctgatgaatattgtgggggatgtggagtttatttccgtcacggccggcgaccagcccgctttttacattgggaaccgcctgattgaaggcggccttcccggcgtttccgcagaattggaccggatttcccgggagaacgagggggatggagggggacgcgtggggattgccttgcggctggattccgccgtttctcgggctctggaacagcagttggtggatatggtgcttgccaagggaatgacgtgctatattgccgcggagcctgcggattgatttttttccattctgccgcatgaagctgaacaaaaagagccgggccaagattttcgacctccacgtggggttgacgtttgactggcgggagaccggcattttgcgctggcgcattttgctgtggatgcttttgttcggcgtttgcgcatccgtggccgccgtgtttgtccatgtggaggtgccgggagtccgccgccggggggaccagccgggcgccgtggttctgcttcctgcggataatccgcgcctgcaccagtatgtgctgcgcaatactccgctgcccgtaaggggccccgtctgggctgatccggtgacagccggcccgatcggggaaacgggcgtgactctgccttccctgcgctccgccgatacgcctctggctcctcttccccccgtgtccgtccccaccgtggcggaccaggtgtggcgcatgtggcagcatccggatttccatatacgcgccatgatgaatccttccctggatgtttccggcacgtgcattccctacctgtctttttgttctccggggctggacggccggattgttacagccggctccctgtccggtttttccaggagcgaggaccatacggggctgagaagcgagttttttgtggtagtggacgtatggggcgttccctcccaggtgctgctgctggagtcttccggcagcaatggagcggacgagtccgccatgaggtttgcccgctccctgcgctgggttccgtcccgggagccgcggagcggcaccatgtccattgaatggaaggaggaagagccgtgagcatgacccttcacgattttttgctgcgcctgtttttgctggcgtccggcggtttttgcgccgtagtgttcatttgcctggcaacggggtgggtacggtctttcctggaccggaggcgcaaggtacggtgccggatatgcgggttccggttttatgtggaggacgggaattcccatgcggagtgcccgcattgcggcgcggccaatagaaaaggctgaaaaaagccctgggcgggagatcgcgcagggcagtggggccggattaataaatccgcagggattcttcatcaatggggagcgagtccatgcccaggtcttccgcgccgtgcgttcccatttcctcccgcacatggatgacgtccacccggctgctcttgccttcaccggaacggtagcggatgcgcggttccctgatgacgacggtgttgccgcccatggcggcagcctccctggtgaagtagtcgatcagttccttgtcttccatggagacatggacaatgcgcccttcaggaccgttaaagtgccctacgttggtatattcccccatggggtattcatcaatgaccagaacttcgttctgagggatgggcgcacgcggcgggccggaagtgaccggcgtccacgcattgggtcccgagggggaggaacaggctgcaatcagacttgtaatgaggcagaaggccagactgaaaaaaggcgctttcatggttgtcctgccgtcaataatcggcaggcggcacaaaaatgcaacggtaaacttcgttgccgtcatgaaagatttgcaccatgacacgttccggagttcttttaacgcagtaggagtcgtgctcttccggaatggggggtgcgtaacggcgcgtgccgcggcgtgcaaagacatgctggcggaatactcccacgacggcatgattgctcattttgacaatggtatagtagtcgctggtaggcagggtgatggaaggtggaacgtctttggcactcacgggcgggattatagagggcggctgaaaacaatgtcgaacctgaaatgtggcatgggatcacgtccggaacgttggcgcgctagtccgtccgccccatcatttcccgtgtttcctggatggtgcgggcctgggcctggcgagcgctcatcatggtgggttgttcaaagctctgccgcttggcttcaatgtcccggttgacggtgcgtccgaggtgtttgtccgcctccttccaggagcggccctgaaggtcggattgctgcgtggcgtattgtttggaggcatcttgccaggactgggtattcacgcccttggcccgggcaatgaagtccggtgtttccagttttccatccgtgaaggatttgacgccgtcccatttcctggtttcaaactgtgtggcggctccgtcaaatttctttttttcaaaggcggtggtttcaaaggcctttttctcaaattgggacatgtcgccgttgtaccggagtccttcaaaggagctccgtttctgggagaccatcttggtgttgccttccttgtccgtctgctggccgaagccgccggcgaatttcgcctccagggcatccatcagctccgcgtccgtttttgccgagtccgggcgctgtttgggctgaaggctggtggtcaccgtacgttcggtggcgcaggagcagagccctgcggcggcgatcaggagaatgtgctgtatccggaacatgctcacggttccctatattcccgattgccgcgcaaattgcaaacaaaaaggcgcctccatcgctgaatggagacgcccggtgtaatttgtctggtccctgcggggattacttggaggcggtcagcttggcgacctggtccttcagttccttgccgaccttgaatttgacgacggagcgggccggaatcggcacgtcctggtcaggattcttgggattgcggcctaccttgggcttcacttccttcacctggaaggtaccaaagttgcgaatcaccacacggtcaccttccgcaagtgtgctggagataatgtccacggcacgctgtacgatgtcgaacacttcaatctgggtgaagttggtttcggcgctgatcttgttaacgaggtctcgttttgttaatgttttagccatatggagtgcagaatgatatgaatgtatgagttttatagttcagcgtgcgtgatttgtctcctaaaaaatcacacaatccgtggcatgcttgatttttgcgtcctcaaccgcgtgatgcggggattttgcttgaccggaacggtttgaatgcttccattattccccgccgggcgttccggcgccgggagggagcatatgcgcaccacgtttacaaccatgctgactgacgctcaggccggaaggcttgagtccattcttgagggaaaggggtttgaaagaagggaggttccctacgcgcgcttttcctttgccgggccttccctgctggtgacggtttatgagaagaagaacaagcttcttctgcaggggaagggaacggacgattttatagagtttacgctggagccgcaggtgaccggcctcctgtcactgccggaggaagcggaagaggatgaggggggtaagggagcccatttcggcattgacgagagcggcaagggggattatttcggccctctggtggtggccggtgtttatgcggacgggcgcataggcgccgcgctgcgcaagctgggcgtctgtgacagcaagctggtgggttcttccgccagaatccgttccctggcggaagggatacgcagggtgcccggcatccggttccatctggtgagcatcggcccggagaggtacaaccagctttatccggagttcaagaatttgaaccgttttctggcctgggggcatgccacggtgattgagggcctggcggccaaggtgccggactgccccatggctctgagcgaccagtttgccaatccgtttgtactgaaaagggccctggcggccaaaaagctgtccatcaggctggaacagcgcgtccgggcggaaagtgacgtggcggtggccgcggcgtccattctggcgcgcgaacgttttgtgaactggatggatgcggcgggagaggccgccggcatgaagctgccgctgggggcttccggccaggtagtaaaggccgctcgccagttggtggcccagcatggggagcagatgcttccgaaggtggccaagatgcatttcaagaccacgcagaacgtgctgaagtgaagggtcaggccggcgtggcgtagggcggcgcttcccttttccatttcccgtctcccacggagaggacggtgattctgaccctgtccagtccgtggtgtttcatgtccagccgttctgcagctttttcactcaggtcaatgatgcggtttttgatgaaggggccccggtcgttgacgcgcactttcacggtttttcccgtgcggagggactggacgagcacctcgcacgggaggggcagggtgggatgcgccgcgtgcaggtgccaggggcgcacgttttccccgatggccgtttctccgctgacgagcccccacagcgcgcattcattataatgggaggcgatgcccgtttgttcataggacagcgcctgttccacgctcatggggtggtagcggtggccccggatggtgtaggggcgggtcatgtagcccgtatagtcccggcttttgggtgaggaggagcaggaggccagccataacagcccggccagcatggccgctcccctgatgatgcccgtctgcatgccttattatatggccgggaagatggggtaatgcaagacgccgatgcgttttcccgctccggagaggacgccgccgccgggaatgctggcgtgtctgcggcagccgggccgcagggacagggagagggacggaatggcctttgccgatcttgttttgattttggttgacttgactgggccgcttgcgtagcgttggtgcgattctgggaacttactacaaataatagataacataatgagcagacaggcattttatccgcatctctcagtggattgtgtgttgatcgggttcgatgaggaagggctgaaggtccttctggttgaaaagacacatgtcgcacccggccataccggcgctatttccaagctgcccggtgatttgatttatgaggaggaagaacttgacgccgccgcacgccgtatcctgtttgacatgaccggcatgtcttccccccatttggagcagttccataccttcggcgcgccgtcgcgcatcaagaatccggcggacagggagtgggtggaagccgtctccggccagaagataggccgcctggtgacggtggcttacatggccatgctgaggatttccaccaagctgcgcaagctgatggagagccacaaaacccgctgggtgcccgtggacggcctgccggagctggcgtttgatcaccgggacattattgatctggctctggagaggatacgttcttccgtgaagaaggagcccgcgctgatttacgacatgctgcccgccaagtttacggcgcttcagctccggcggctgaatgaggagattcacggcaagcccatggacgtgcgcaatttccacaagaagatcgcctcccgtccctacattgtgccgctggatgagaaggaggagggcgtggcccaccgcgccgcgcgctattaccgttttgaccgcaagatttacaaccgcctttattaccggagctgatgccctccggctgtccgggtgcggccgttccgccttgccgggcctcttcccgccatgtttgcggggaggggctcttctcatttgacagagtccgttttgtaacgcatcttatccgcacgttgattcccatgacagatccggccttcattccagacgattttttcaaggtgctggcgccttccgatatttttggaacggacggcccgtttgaagtggatctgggctgtggagacggagggttcctgctccagatggcggcccattatccggaacgccgttttctgggcattgagcggctgttgggccgcgtgcggggcgtttgctcccgggcagccgtccgcggcctggaaaacgtgaaggtgctccgggtggagagccgttatttcctggaatggatggtgcggcccggctgcgtttcccggctgcactatttgtgcccggacccgtggcccaaggagaggcaccacaagaaccgcctggtgcaggatgattttctgcccgtgctgcaccgttccctggcggacggcggggaattcctgtttaaaacggatcatgaggagtatttcctgtgggtgctggaccatgtggcgcgcagcggcctgttcagcaggtccggttgggaggatgatgagtttttttatccccggacggatttccagcttcaatgggagtccatgggaaaaccgatttaccgcgcccgcttcattaaattgcagaaagcctgattccgatgccttttacacttcaccagaaagattcctccacggctgcgcgcctgggcacgcttgatttgccgcacggccgggttcccacccccatcttcatgccggtgggaacgcagggttccgtgaaaaccatgcatccgcaggatttggagacgctgggggcccggattattctggggaatacctaccatttgtccctgcgtcccggttccgccctgatccgggaaatgggcggcctgcaccggttttcctcctggaaccgccccattctgacggattccggcggtttccaggtctggtcccttgccaagctccgcaagattacggaggaaggggtgcgcttccagaaccatctggacggcgcgtacatgatgctgagtccggagcgttccatggagatccaggcggacttgggcagtgacattgccatgctgtttgacgagtgccccccttatccctgcgacaggaagtatgcggaagcctccctgggctatacgctccggtgggcgcgccgctgcaaggactgggtgcaggagcaccggccccgttccggggaagggcgtcagcaccatttcggcattgtgcaggggtccgtgtatgcggatttgagaaagaggtgcgcggaggaactggccgccatggagtttgacggttatgccatcgggggcgtttccgtgggagagccggaggaagagatgctccgggccatcgaccattccgcaccctggctgccggaggacaagccgcggtacgccatggggctgggcacgcctccccagctattggagatgatcgcccgcggcgtggacatgtttgactgcgtgatgcctacccgcctggcgcgccacggcgtggccctgactccggacggccccatgcatatcaagaaccagcgctgggcggcggattcccgcccgatcgacccggaagggcatccgcatgtcacacaattctcccgcgcttacgtgcgccacctgttcaaagccggtgaaatactcgctttaagattgctttctttccagaatctggaattctatctccggctaatggctcaggcgcgtgaggccatagccgccggcacgttcggctccttcaaggattcattcatcgcgcggtacaaagcaaacgacattttatgaatatcttcatgttagcacaggctcaggatgcggcggccgccgccggacaggaaccctccaatatgttccagcagattctcagcagccccatgttcatgtttgtgatcatcatcgtcctgttctgggtgatgctgatccgcccccagagaaaggcccagaaggaacagcaggcacgcatcgcggccctgcagcgcggggacaaggtggtcacgaacgccgggctgcacggatttgtggaaaaggtgaatgaccgcaccgtctccctcaagattgcggaaggcgtggtggttgaactggaaaagaacgccatcgttcaagtggagaagtaaggttttccgccttccgtacgttttcagcatccgcccgtgtcgcctgacggcaagggcggatgtttatttttgaaaccgtcttttcccggcggggttaataagaatgatcatgagattgcctcacacgttcatcctgtcctgttccgcggtgctggcgttcggttttctgccgcctgcggcaggtcagaccgcggcttccgtagaccgcagggaagaggagcctgttcccaggcccggactggaatgtcttcaggtaaccctgctgatccgccagatggttctggaccggtatgacagcacaggaacgggcattttgtccgaacaggacaaggcccggctggtggaggatgcgcgcgctgcgcaaagggaagcccggaagaagttcctgatgcagtttgacaaggatggggacggaaagctttctccggaagagtacaaggccttccgggagcatgtggagaaacgccgcggttcccgcaggccggacgccgccccggacaagcggggcgagctgccccctcctcccccccctcccggcgaagggcgggaaatgcccatggtggaaatccggacggcggcccggaagcgcttcatggtggctcccggcctgttcctgctgacccggaacatgctgatgcagaagtatgacgccaacggaaacggccgcattgatccggaggagcatgccgctgtcatgaaggatgcggcggctctgtaccgggccagaatgaaggagatgatggacctttacgacctggaccaggatggcgtgctcagcccggtggagaaggagcaggctctggcggacagccataaggacagtcccctgtatgccatggaggaaccggacgacattgacctgttcatccgggcgaatatcagtgaagtgctgctgaaggaggctcccgtgaacagcggggaggaaaaggagaagggcacggaataattttattcttcatgatggagaaccctctggaaccggaacaggccttcctgcaatatctggaggtggaaaagcaggcctccccccatacggtggaggtatatgcccgcgcgctgcgccagttccgggcctgggcggccggggtgttcacagggtgggaaaactgtactccggaccagatgagggactggctgttccaggaactgaaggatgaggccgccacggcctccatccgcctgaggtttgccgccctgcgcagtttttaccgtttcatgatgcggcggcgcagcctggaagcgagcccgatgacgggcgtctccctccccaggaaaaagaaaaacctgcccgttttcctgacgcttaaccagatgctggaattgctggagctgccgtacaagacgcctgttcctgcgaatgcccccgcgtggcttccctaccgtgacgcggctattctggaacttttttattcctgcgggatgcgcctgagtgaactggtggggctggacgtcagcagcgtggaccaccgtttccggggggtgcgcgtgatgggaaaggggcgcaaggagcgcattctgcctgtgggcgctcctgcgctggcggctctggaggcctatgcctccatggcctgcctgcctaaggattcccccctgtttgtctcccgtataggaacccggctcagcgcgcgcgccgttcagatgatgctggacaagtacgtgaagctgtcttccattcctttcaccatttccccccacaagatcaggcacacgtttgccacgcacattctggatgccggggcggatcttcgttccgtccaggaactgctgggccatgcctccctgtccaccactcagatttatacgcatgtgacgcgggccagaatggcggaagtttacaggcaggcgcatcccagggcataaggccgttttatcccatgacggaagaactcatattcgcaggaatcctgctgctctcccaggcgtctccgggccctgaccaggcttttgtcacccggagcaccctggcttacggctttggcgccggggtgatggcggctctgggcattggaacaggggtggtcgcccacgcggcgctggcttgcacggtgggggcttccgtttttcacagctccctggggctggtgcttttctgtgccgcctcctgctggatgctgtacctggcgtggaagatatggccgcgggggaggaagggcagccttgccgggagcggggatattcccccggcttccggcatttaccgggatgccctggtgaccaacctgatgaaccccaaggccacgttcttcttcgtggccctctccgccccgctgctggaaaagaatcatgacccttcctatgccctgttccttggcgcattgatcgtggtgactgggacggcggggtggattctgtgggctctggttttccgctggcagcctatccggtccttttatgaccggcatgccggaggggtggatggagtgctgtctcttgtgctggcggggttcggcctcagcatgctgtactccttcgggcgcatggcggtggaaagtttttcctgatgcggagatgggagggaacggcttttttctcggaaaaataactctggtattgacaatgactccattatatcgcatacatctgcacccgctgtggggagctgaacgcgcacgcatgtgagtgacaaggcgcgcaagttccccattaacaccttttacttataattgatatggcagtagcaatcagactcaaccgtcagggttccaaggaccgtccttactataaaatcgtagttgtcgacagccgtgctcgtcgcgacggccgttacatcgaacaagtgggctcctatgatcccatgaaggaaggcgtcaactacaccatcaacctggaaaaggttgacaagtggcttgccaacggcgcgcagccctctgaaacggtcaattccatgatccgcaaggcccgcaaggcctaagcccggttcttcatcatctttcctgaaggcgttcctctgacggggaccgccttttgttgtttcttgcgctgatgcgggagaattgtcaggtggcatccctgcgtcgggaatctcccgtacatagaaaaacggcccggcgtcactgccggcgggactggaacaccctggcggattccagaatgccgaacgcgatctcatgaatgtgaagattggccgtgtcaatggttaggtgcgccgtttcccggtaaaaatcatgccgctctttcatgaggcgccccagcacggctttgggattgggctgctggagcagggggcggttggtgcatctggaaatgcgctggtacagggtgttcacatccgtatgaagccagacgacgaagcccagctttttcagcaggtcccggttttccggcctaatagtgatgccgccgcctgttgaaataatgcggctttgcctggccaccccatgcaattggcgcagaattccggtttccaggtcacggaaatgtgattctccatgagccttgaaaatctgcggaatgctcattcccgtctggtgctcgatcatctggtccgtatccgtgaaacgaaggctcgtctcccggtgcaattccttcccgatggtcgttttgccgcaccccatcagcccgatcaggatgatgtttggcaaggatgttggcgcggcccccttcatggcctgattgtactcaatccggcggcgtgagaaaacaactttttagccgtatggccttttccgtctcctgcttccgctccgggcggaatgccgcaatgggaagggtcaaggaggcccggtttggcaaataggggaaggccaggaaccttcatgtccggctgagatgccgcactcccgcgaatttgacggcttctcccctccggggaaggaggtcttacttgacgcaggagcttccttcaggcaaggataaggccatgcaaaccgaaatgttcgaggtagaccccctgtcagacaaccgcaagctgtatgttcgtgcggcggaagcgctggctgcgggagcgctggtgggaatccccacggagaccgtgtatggcctgggagcggatgccttgaatccggaagcggtagccagagtttttgaagccaagggaaggccctccttcgatcccctgattatccatgttcatcatggaaaggaggtggacaaatacaccgccattccggaggaactgaaggaactggtgcatacgctggcctccaaattctggccggggccgctgacgatggtattgccgaaggcggacatcatcccggacatcgtgaccagcggcctgcctacggtggccgtgcgcgtaagcgcgcatcccgccatgcgcggggtggcaaaagcgctgggccgtcccgtggccgcgcccagcgccaaccgcttcggccatatcagccctacttccgcctccgccgtgcagaaggagctggatggacgcatagaaatgattctggacgccggagcctgctctgaggggctggaaagcaccatcgtgcgtcccatgcttgacgagaagggaaagcccgcgctggaactgctgcgtgaaggtccggtgacccgggagcagttccggaacctggtgaaggtggtgcgccgcaagcctgctgtccgtcccgtttcggaagaagctccggcggatgctccgggccagctcggcagccattacgctccgcgcaaacccatgacgctgctggaagccggggaagaattcgtgcccgtggaaggagtgcggtacggtctgctctcctatgagggaacgtctgatcttgcccaggagggcagttggacggaagtggtggccatgagccccggcagcggacggctggcggaggctgccgtgcgcctgtttgccctgatgaggcagatggatgaaaatgaagccattgacgtcatcgtggcggaacccgttccggaagccgggttgggccgggccatcatggaccgcctgcgccgcgcctccgccgccagggaatgacttgtccacggctccccggatatgctacagtcaccgcgaatccctttttgaacttatggccgctacgttatttgaaaaaatctgttccggggaaatccctgcggacatcgtgtaccaggatgaacaatgcgtctgcttccgggacatcagcccccaggctccggaacacctgctgctggttcctcgcaaacccattccccgcctttccggtgcaggggaggaagacgccgccctgctgggccatatgatgctggccgccggacggattgcacggaccctccacctggatgaaagcggcttccgcctggtcatcaacaacggcccggacgccggagaggcggtaccccatctgcacatgcacctgctggcaggccgcaagctggaatggcctcccggttaggccggagcggaattagcgccgccggtgggagggaggggatgtgtcattcctgcccttttccggggatggtgccgccctgtctgcttgtcaggcgtggagtctgcctgtaagatgcattcatgaaaagattgctggtagagcttgaaaacttgccggaagcggggaaaaaatacagcggtgagctggattccgaaatcttcggcatcgatgatgaagaggttacttccattgggcctcttgcttttgacttgcaggtgcagagatttgaaaacgaattattcgtacggggcaatatttccgctccgttcaaattccgttgcgtgcgctgcctgggctactttgactacgtggtggaggtaagcgattttgccgcctcttttgaaattgacgcacagagtgttgtagacgtttcagactccatgagggaggaaatagtcctggattttcctgcctatccgaaatgtgcggacggaggcatggaaaatgactgtatggcgaaaactccatattttggagtggacaaagaggggggaacgggtgtaaacagttctgccccgagtaagaatagcggcgtgtgggacgccctcaatgagctgggggatcatcattaatcacctttttaccaactaaaattatggcagcacctaagcgcagaacgtccaagatgaagcagcgtacccgccttgccgcgcaggcatggcgtgctccgaagctccgcaagtgccagaattgcggcagcagtacccccggtcataccgcctgccccaattgcggtacgtacacgacccgctccggcaaggaaatcgtggtgaaggcggaagcgtaagctccgcaggcgccgcatttgccttgaaagttatcgccgtactgcggcgctaccatgtagacctctccagccgcttttgctccgcaaagcggctgaacttgcttgaagcaggcttttttttctgctaacacatttcttcaacaaatactatgaagattgcactggatgtgatgggcggcgacaatgcgcccgatattaacatggacggggcgaagcgggccctgcaggatttccctctcattgaaaaaatctatcttgtggggagggaagaggtggtgcgcagctcctgtgaccgctgggggctttccggtccgcgcgtggaaatcgttcccgccgcggaagtggtggaaatgaatgaatccgggctgctggcggtaaggaaaaagaaaaactcttccatgtccgtctccgtggacctggtcaagaccggggatgcggacgccgtggtcagcgcgggcaacacgggcgcggccgtagcggccgccaccatcaagctcaggctgctcgacggcgtggaacgcgcgggcatcgtgacccagcttccgaatgaattcggagtctgcaatgtgacggacaccggagccaatccggacgccaagccccgtcatctggtgggctatgccgttatggccagtattctggcgcgttccgtatacggcaagccgatgcccaaggtgggcgtcatgagcaatggctccgaggatgaaaagggaacggactttaccaagggaactttttgtctgttgaagcatctggaggagcgcggcgcgctcccttttaaatttgtgggcaatgtggaaggccatgatctctttgaacatgaaatagacgtggcgctgacggacggctttaccgggaacgtcctgctgaaaacctgcgaagccaccgccaaggcgttcggcaaatggctgaaggaggaacttcaggcaaacccgctccgcatgatgggagccgcctgcgcttccggcgcatttcgcgccatgaaggcgcgcctctctgcagactccgtggggggaagccccctgctgggcgtccggggcgtgacgatcattgcgcatggcagctccacccccgtcgctatccgcaatgccctgagagtctccatggaaatggtgcagcagggtgtcaatcccctcattgaagaggagatggccaggctgggcactattccggaggtttccgaagtgtaccccaaataatcaatcatgtttcattttctgaaaaaacatgccgcagcagcggcaaaagaaggaaaaaaaccggaagaggcggcctccgtgccccgctcccccggtgaccgcctggactccagcctggcggtatccgtgggcctgtgcgtgctggtcttcatcgttcttcaatggatgggcagttacagcccccattgggggaaatccgtctggcaccatgtgtcggaagcctttctgctcttctccgtgacgctggcgctgatgcccatgtactggctctgcgccggttccctgcgcaggaaaaacaaaacctttgtcgtcacgtggggggccattctggtccagctcctgttctttggccttatccggcatgtgacggctgatattacgtccgacatcggcaacgaactcctgtacctgccctatatgatggcaccgctgattgtaacggtgctgctggggccgctgctgggcatgttcgccaccatctccatctgcatgctcggtggattcttcatcctgccggagcagtacgtaccggaaaagcaggtccaattctggatcttgagctccctctccggcatgctcaccgtgctgcttacccataacctgcggaaccgtgcccagttgctgcgcgcgggcttcttcgtggggctgctcgtcatggtattgtgctgcatcatgggcgtcatcaatctccaggcgtgggactacaacctggtaggcgtactggtatgcctggccgtggcgtttggcgtaagcatgctgaccagcgtgctgatcagcggcgtactgcctattatagaaggtgtctttaaaatcattacgcccatttcctggctggaaatggcggacatgaaccgcccgctgatgaagaggctgcaaatggaagccccgggtaccttccaccactgcctgatggtcgcccagctggcggaagcggcggcggaagccatcggcgccaatcccattgaatgccgggtagcggcctattaccatgacatcggcaaaatgcagaaccccctctacttcattgaaaatatcatggacggtcccaacccccatgatgagctcacgcccagcatgagcgcccgcatcatcatcgaccacgttcaggacggggtggagctggccagggcgaacaaccttccgcgtcctctggtggaggttattgagcagcatcacggcacctcgctggcctacttcttttaccggaaggcccttcaataccgggatgaaattctgagccgggtggaaagcggactggcctctccggatgatgtgccggaagtggtggaatccaacttccgctacaagggccctaacccccagagcaaggaaacgggcatcgtcagcctggcggacatcgtggaaagcgccacgcgctccatgggaaaaatctcctgtgaggaaatgcagaaaagggtggatgaactcctgaagcagagggtggtggacggccatttggacgattgcggccttaccttcggggatctcaagaaaatccgcaacagcttcatcaagacgctgaaaagcattcaccacaaccgcattgcgtatccttcccacaatccggaggcaaaaattgaaaagcctgttcttcctgtggtgactgccatgaaggaagaggaaaaagcggagaaaaaggaaggggaaggcaaagctgttccggaaatcatggaactgcccgatgccggccagcaggaaaagcccgcagaggtggagcagaaggacgggacggatacggagaaaaatgaaaccgcgtcttgaactttataatcatctggaagaagggtgtctcagtccgtccgttgcggataccctggcccgtgccctggatgcctgcctccccgctgtgctggcattgcctgaaggccctgtgcccgtcctctccggattggacgaggtggaaataagcgtggtggacgatgacgtgatccgggacgtgcacgcccgttttctgaatgatcccacggtgacggacgtcatcaccttcccgcatggggacggaatgggagaaatcatcgtcagttatgataccgccatccggcaggcgtcggaattcaatgagccggttttcagggagctcttccggtacatggtgcatggtcttctgcacctgcacggctacatagacacggagccggaagaacgggaacgcatgttctcccgtcaggaaccgctggtgcgggaattcgggactgccctggcaggcatctctttcccggataactgctgacccggcggctgaaagcgcgcttttaaaagatacgggcttgccaagccgagatgaactctgttaatctttttccgcaccatgcgtccatagctcagttggatagagcaactgccttctaagcagtgggtcactggttcgaatccagttggacgtgccatctttcggaaccccgtattctttttaagaaaaacggggttctttcatgtgagggaaaagtttctttcatcggtggaagcatgcctgcaagaacggtggaacggggccggaaatggtgcaaatgtggatgggcggcctgaataaagcggcattatcccgtgtggctgtcttgctccgttgtcggaagaaatagcagttcccgttcttatcttgtgcacggaaaaggaggcctcctgttcttcaatcaatcctgttgggcgatggaactgatggaatgggggccgtagttaaaaaatccttctgccgtcatcacaccggaaggggagggaagggcctccgaatgggcgccatactggatggaaagaaacggttcagactggcgggaatactgaggcgttccggagatggtccgcgcacggggctagtgcattcaatagcgcatgtattcacagaaagggaaccgggaggctgaatattttttattctgcctgccgggtgcaaatctctggggttctgatgaaaccggaagtttggagcggatttgaatattcatcctgaacgagtacatttacgcacaactccagaattttatgcatgccgtacatgggaaggtcgatctccggatggcgttcctgaaacttgtggataatgctcatttccgtctctgaaaaaatcacgggaatggtatttgatatttgaattttccagggttcgccctcactcatcagcttgccgatgaaaagggactgggtgacgggaatgctgccgcgaaaggcaaaccaggtgtgcacggtgcggacggaaacccggcattgttccgccagccattggcgcgttttaccgtgtgtgcggagccattccttgattttaagcttttcaggattgttttctttctcagaggaagaagcgtttaaatccgcatcggcagccagttccggaatgattcgggaaagtgcttttttcgtattggccgatattttgcgaacgctcatctgtgcgtaaaacgtctggggccggattcctatttcctccgccaattggtaggacttgcgtttttggcattgcagccattccttgaccatggtgcgtatatcgtcgtcagacatgaattgatgcaggttatgtgatgaaagaaaaaataggatggcagcgtttgaaacgctattttctctttccttggaactgttccgggatagtgaaccctgcttttaacttttgctcttgatgctggaaagagcatccaaagcctcactggcccattccggaacggtcaaaccgtggcgttccgcttcatttctgaacttctcatacttttgaggagtaacgggaacataaatactgttcgggttcttggtctgcaccaaacgtgcgtgtttggcgtactcctctttcatgattctgatgatgaggcgttgtcgtgcacggggaataggaacagtagaaagccatttatcaacctggcttttgctaacgccgcaaagatcggcgaactcgtcacgtgtcatcttcgtaagggcaagaaactttctgatgctggacttcatttcatccatgcgcgcatttttcgcattcagaaaaatctggcaagccatttctggcatattttctattttagaaaataatattgtctttgtgtatccgaaaaggtaaatcgtttttcctaaatccaatgaaactcaaaaaaatgtgaatcctggaagcgcctgttttcttattttagacgaaaaacttcatgtttaatattcttccttcttcaaggtatttttaccgctgttccggaaaaggagcgcccgttgggagggatactttctggttcatcttcttctattggcttgacgaagcccgttccgggagtaccgtgttatcatgttaaattcctctttattcgccttggggtgttccgcggtttttatgatgtctgcgggaatgcctttactggctgcctctcctgaaaaaaaagaaaataaaactgccgcttctgcggatgctcttcccaccctttccctggagggattgccggaagtatggctgcagggaacgcctgtcaaggaatgggaaaaggacaaggtatacatctttgaattctgggccacctggtgcggaccgtgcctggccgccatgccccatatggaacaactgcatcaggcatttaaagacaacccgggcatgcagatcataggagtcaatgtcatggaccggaaatctccggaggctctgaaggaatttttaaaaaatcggccgtctccccttacttacacaatggcggtggatgtggatggaaagagaaccagggaaaaatggctggctcctatggatgtgaacggcattccgcatgcctttgccgtaaagaacggtaaactcatctggcgcggacatcccgtaaaactctcggaagaaatcatgcaggccatgttgaaacctgatttttccgccgcttcccttccgtcggaaaattctgatgcgggcgcccgtgagtggaagcgttatcgggaagtctcgaaaaagctgggcgaggtggtccggaaagaaggaaaacagggagccatggcgtttttaaagcaaatccaggattcaagggaatttcaacaggatcagatgattcaactgaagatgatcccgttcatcgtactagcggaaaaaggagaattccaggaagcacagtcggtacttgacagcttgtgcaaggaatatccggacaactaccgcgtgcagatcaatgtggctggaaccttgatggaaggaaaatcagttcctgccggcaagatggatgccgctctggtggagcggtgcctgaaccgttgcattgaaatctcaaggaaaggcaacaaggaagcttcccttccctggcgtctgatgggtgaactccgggagcggcagggcaacatgaaggaagcgcttcgggatatggaaaaggcgctttccctgacctccatcagcaaggcgtggacgaagctgcagcagctttcgggcaattcggagacgttccaatcccttgtggaccaggtagctgaggaaattaagccggagcctcctcggaaaatgcaggaaatggggcctgtgcaggaagacaaggaatacacgccccttttcagcaagctgaattggttcaatcatcccgggctgacgggcttgccttctgacaaaaccgtatttatcagcttctggagaggagctgcgaggaacaatggcatgtggagtgatggagctccggggaaaacgcttgatgtagtcctgaaaaaatatggtcttctggacaatcccaaggtgaaggctgtggtattgggtgtcattccgatggatcaaaaacagatgcaggaatatctgtctggtccggaaggatggactgcctaccctgtcggtattccgtcggaccattccgtgatggaactttttgattccctgaagcttaattcgttccctgccgccgccgtcgttcgtgacggaacattgctgtgggcaggggaaattaaaaggatgcccgcgtgggtggcggaaacggccctctgggactcttttgacaagaaccggtttgctgaggaggatgcgaagcgcaaagctcatcagcaggccctgcaggcagtcatcaaaaaatcctttgaactgcgcaaggaaaagaaatttgatgaatacaaaaaactgattgaggaaaacgccgagcgatttgccgatgacggatggtttgcctctacagtggcggaagttcaggcggggaaagcctggaaggagaaggactaccaaaaggtggcggacatcatagaccaggtgctgaagcgttttccgaaggaagactccctggcttcttacctcctgaaaatcctgaatgggtcggatgaaatgcgtggatacaactatcaagcggcccggcatgccctccagatcatgaaagacttcaatacgcgggatgacggtggttataatgcggcttgctatcaagtcatgatggaaatggccatggagaaaaaagactacgcccaggcgaaaaaagacgctgtgaatgcactccgggaattacccctcatgcaccagtatgtagccatgaagaaaaaacaggcggaagcttaagaattctgaaacgtttaggcccctttcgtgatgaaaggggccttttttgcgggaaaagagaaaaatgtaatacgttaagaatcagtaatatttagaatgctaaaaaaatctcacaaaaaacgactcgaaaaaaattgacaagggaggtgaaaatggtagacttctcggcacgccaacacggcgacgggatgaaaagcccggcggcaggagggactcggaagagggcctgaatgaagccggggccggccacccggaagagcctcattaaaggggccgataagaagatttcaagggaatgactaccgaacccgccgagggttttcctgaatgcgtcgagagacgtgtgagggagaaaaaacccgaaggagcgacctagctccgagaggggcggattggtagaagcaaggggaaagaaaaaaggtcgtgacgcgcgccgtgcttggcagagcgaagaggacctcaagagacacaacttgagggaagagctgactgaagcatggcgcagatgaaatcgaaagattccatttggtccagcaatttcaaaaattatatttgatggagagtttgattctggctcagaacgaacgctggcggcgtggataagacatgcaagtcgaacgagagaattgctagcttgctaataattctctagtggcgcacgggtgagtaacacgtgagtaacctgcccccaagagtgggatagccccgggaaactgggattaataccgcataaaatcgcaagattaaagcagcaatgcgcttggggatgggctcgcgtcctattagttagttggtgaggtaacggctcaccaaggcgatgacgggtagccggtctgagaggatgtccggccacactggaactgagacacggtccagacacctacgggtggcagcagtcgagaatcattcacaatgggggaaaccctgatggtgcgacgccgcgtgggggaatgaaggtcttcggattgtaaacccctgtcatgtgggagcaaattaaaaagatagtaccacaagaggaagagacggctaactctgtgccagcagccgcggtaatacagaggtctcaagcgttgttcggaatcactgggcgtaaagcgtgcgtaggcggtttcgtaagtcgtgtgtgaaaggcgggggctcaacccccggactgcacatgatactgcgagactagagtaatggagggggaaccggaattctcggtgtagcagtgaaatgcgtagatatcgagaggaacactcgtggcgaaggcgggttcctggacattaactgacgctgaggcacgaaggccaggggagcgaaagggattagatacccctgtagtcctggcagtaaacggtgcacgcttggtgtgcggggaatcgaccccctgcgtgccggagctaacgcgttaagcgtgccgcctggggagtacggtcgcaagattaaaactcaaagaaattgacggggacccgcacaagcggtggagtatgtggcttaattcgatgcaacgcgaagaaccttacctgggcttgacatgtaatgaacaacatgtgaaagcatgcgactcttcggaggcgttacacaggtgctgcatggccgtcgtcagctcgtgtcgtgagatgtttggttaagtccagcaacgagcgcaacccctgttgccagttaccagcacgtaaaggtggggactctggcgagactgcccagatcaactgggaggaaggtggggacgacgtcaggtcagtatggcccttatgcccagggctgcacacgtactacaatgcccagtacagagggggccgaagccgcgaggcggaggaaatcctaaaaactgggcccagttcggactgtaggctgcaacccgcctacacgaagccggaatcgctagtaatggcgcatcagctacggcgccgtgaatacgttcccgggtcttgtacacaccgcccgtcacatcatggaagccggtcgcacccgaagtatctgaagccaaccgcaaggaggcagggtcctaaggtgagactggtaactgggatgaagtcgtaacaaggtagccgtaggggaacctgcggctggatcacctcctttctatggagaaagtgcatgaaaaatgcacaggtcggatctcttcccgagggaagagagagcgaaacccgcgagggcccgcaacgaaccaaagatgtgtaaacagccagttcgcttggagcgaaactaggcacgacgtgcgtgacgaccttttttcaaaaagaaccgcaactgggggtatagctcagttggtagagcgccagctttgcaagctggatgtccggggttcgagtccccgtgcctccaccagtttcggtaagaaggcggcaacggagaacgataaatggctattaactattgcctgttcactgttaactgcctctgcgagacccaaaaccgggcctgtagctcagttggttagagcacgcgcttgataagcgcggggtcacaggttcaagtcctgtcaggcccaccaaaaaaatcgattattgagggaaagcgaaaattgacatctgcgtggcaaagaaaacaattgctgagaagcaattgctttccaacaaagtgggtagttgaaaaacaactacaatacacaatttaaaacatgcataccaagaaataagacaatacagtaagtcacgaaagggctttgtggtattgtggaagtggtaaaaaacttttgcaatatgatgaagtaagtaagggcgtacggtgaatgccttggtgccaacaggcgaagaaggacgcggcaagctgcgaaaatcctcgggaagctgcaagcaagcgatgatccgggggtatccgaatggggtaacctgatcgaggcaatactcgatcgttcatacctgaatacatagggtatgaaacgcgaaacccgctgaagtgaaacatctcagtaagcggaggaaaagaaagagaaatcgattccgtaagtagtggcgagcgaaagcggatggagcccaaaccgaaggtactccttcggggttgtaggaccacgagatattcgaccatactggatagtagaacagcctggaaaggctggccgtagaaggtgaaagccctgtagacgaaatccagcgtgggaattagtgggatcctgagtaatacatcacacgtggaacgatgtatgaatcagcgcggaccaccgcgcaaggctaaatactagttggcgaccgatagtgaacaagtaccgcgagggaaaggtgaaaagaaccgctgtgagcggagtgaaatagaacctgaaaccgtatgtctacaaagtgtcagagcagagcaatctgcgatggcgtgccttttgtttaatgagtctgcgagtcagtgtttgtggcaagactaagggcttccggcccggagtcgcagcgaaagcaagtccgaatagggcgaattaagtcgcaggtactggacccgaagcggaggtgacctacccttggccaggttgaagcatgggtaaaaccatgtggaggaccgaacaggtgaacgttgaaaagttctctgatgagctgagggtaggagtgaaaggctaatcaaaccccgtgatagctggttctcttcgaaatgcatttaggtgcagcgtcacgtgctgatgcgcgggggtagagcactgacaaggctagggggcacacccgcttaccaaaccttatcaaactccgaataccgtgcaatggaacgtggcagtgagacagtgggggataagcttcattgtcgagagggaaacaacccagaccagcagctaaggtgcctaaataacgctcagtggaaaggatgtgggattacacagacagtgaggatgttggcttagaagcagccaccatttaaaaaatgcgtaatagcttactcatcgagtgatcctgcgccgaaaatgattggcgatcaagcgttataccgaagctctggactttaccttacggtagagtggtagaagagcgttgcatgcgcgttgaagggtgatggcgactgaccctggagcacatgcaagtgagtatgcagacatgagtaacgtaaagccgggtgaaatccccggccgccgtaaacccgaggtttccagggcaacgtgtttcgtccctgggttagccgggacctaagccgaggccgagaggcgtaggcgatggatatcaggttaataatcctgagctcgcgacccttaaactggggggacgcatgagaaaagatgactaggttattgaattccgagttgagtccacggactcagcgcatcattggatcgagtgccaagaaaagccccagcgtatgctaagcgacccgtaccgcaaaccgacacaggtgggtgggtagaatataccaaggcgtaagagtgaaacctggttaaggaactcggcaaattagccccgtaacttcggaagaaggggtgcctgcagcgatgcaggccgcagagaaatggcccaaccgactgtttatcaaaaacacagcactctgcaaagacgcaagtcgaagtatagggtgtgacacgtgaccaatgccgaaagattaaggcaaggggttagccgcaaggcgaagctctgaacccaagtcccggtgaatgtcggccgtaactataacggtcctaaggtagcgaaattccttgtcgggtaagttccgacctgcacgaatcgtgaaacgagttgggcactgtctcaaccaggcgctcagtgaaattgtagtggcggtgaagatgccgcctacccgcagaaggacggaaagaccctatagaccttaactgtaagctgtcattgtttcttcggttttaatgctcagagtaagtgggagacgctgaagacgccctttagggggcgtcggagtcatcaatgagacaccaccctttgaaactggaggatctaaccctgagccgtgaatccggccagaggaccgtgtcagccggtcagttttactggggcggtatcctcccaaagagtaacggaggagcgcgaaggtgggctcagcccggttggcaaccgggtgtcgagtgcatgggcataagcccgcctaactgtgagaccaacaagtcgagcagatgcgaaagcaggcccaagtgatccggcggtagaaagtggaattgccgtcgctcaacggataaaaggtaccttagggataacaggctgatcacgcccaagagttcatatcgacggcgtggtttggcacctcgatgtcggctcgtcgcatcctggggctggagaaggtcccaagggtccggctgttcgccggttaaagcggcacgcgagctgggttcagaacgtcgcgagacagttcggtcctctatcctctgtgggcgttggaaaattgaggggttcagaccttagtacgagaggaccgggtctgacgcaccactggtgcatcggttgtactgtcaagtgcatggccgagtagctaagtgcggacgggataagcgctgaaagcatctaagcgccaagcccatcccaagatgagttttccctataggttcgtggaagaccaccacgttgataggtcgcaggtgtaagtgcagcaatgtattgagccaagcgatactaatcaccaatagacttcatcatattacatcactcccgttcgtgaataacaacttgctgttgtcttgttcattggatgtatgtttaaaagtaacaccaccagccacgcagatgtcagtttacgctgattccttcccctcgtaacgagaggaaatcttcttagccacacacacaacaacccttaaaaaatccccctcaaagcccccccaagggctcccgggcaggcaggatgaagaaaatgaaaaactcttccccctgaagcccggtggccagagcgcagtggtcccacccggtcccgttccgaacccggaagtgaaacgctgccgcgccaatggtagtcggacgataggtcccgcaagagtaggtcgccgccgggattttttttcatcaggccccgccagttcctcaactggcggggcttgttcgttttcttgatggcgcgatcttccttcctccggctaagtggaactgaaggaggatgaggcaaacaaggaggacggctatccctgtcgtaatagagttcttaccttacgtaacatttccttaactatccctctttctttcttaacggtttaaggatatccctgctattgacggcacccgttcttccatcaaaaatggcggcgtatgaaatcccatatcattcagaagcccgttgcggtcatcctggggaacgccggcaacataggatacctcgccgccaaggcgtttgcgtgccggggaactgtggttgccatgttgcatgaagccggtgaagagtcttcccgcgtggtggactgtctgccagggggcaatcactttggcatgtcgggctgtctgggccatcctccggatctggcttccttcgcagggctggtacataccctctatggacgagtcgattatttgatcaactgtgaggatgccgcggttgaggtgcagggcctgaattgttccgcacgcagtcgcctgtccattctgcttgagcacgcttttgtttccggcgccatggtcgtgaatatggtctcccgttccggaagaaaggtaagatggagggagcagtgttggaaggaagatgccgcagggttggaaaattgtctgaataggaaggacgtcaggataaaccaggttgtgattcaccgtccggtatttcggcacgtctcccagtccaggctggcttcctccgcgtgtgcggcggcgttatttctgtgcgggagggaagggcgtcatattcaccgtgaatacatcgttgtcaatggaagaaaagccgcttggaagcccggcatgaggacggaagcatccctttccttgttcaactcctgtctggaattttgttccgtctgttcccggacggtattccgggatgcctaacaggcatgccatatttctgtattctgtcgtgacaaaaagtgtctgttaatatagtatatttccaagtaaggttatgaagtttcaaggtctttatacagcaattgtgactccgtttgtcggcaatcgggtcgatgaagaggcttttagaatgcttgtggaagcccaggtggctgccggcgtggccggcattgtggccgtcggcaccacgggtgaatcccccaccttgactgtaaaagaacacttgagggtgattgaactggccgtggagagcgcggcaggccgcattcaggtagttgcaggtacgggggccaattctaccgcggaggccatccatatgacccaggaggcggagaagatgggcgtggacggtacgcttcaggtgtgcccttattacaacaagccctcccaggatggcgtttatgcccatttcaaggccattgcggacgccacccgcctgccgatcatgctgtacagcatcccgggccgttgcggtattgaaatcagcgtggagacggtgggacgcctggcaaaggactgtccccacattatttgcgtgaaagaggccggcggcagcgtggaccgcgtgaaccagctgatgcaggtggttccggaagattttaccgtcctgtgcggtgatgacggcctgacggttccctttatggcctgtggcgccagtggcttggtttccgtaacgtccaatctggttcccggaatcatgaattccatcgtgaaagccggcctggatcagaatatgggtgaaatgctttccctccagaaaacattttatccactgatgaagggcctcatgacactggattccaaccccgtcccgatcaaggcggcgctggcgctgaggggggatattcagcccggcgtgcggcttccgctggttcctttgccggaagaaaaggaagcccagctttccgcgcttcttcaacgtttcaacgttctttgatatctcaactatatgatttccattcttgttacaggcatttcgggccgcatgggccacgctgtccaggaggcggtgacgcagaatccggacacctgcgtgggcgccacgtacgaccaggggcaggagctttatccggcccttgccaaatgcgacgtcgccattgatttttcccaccatgctttcaccagcaccctgctggcggaagccgtagccaataacaagcccctggtgataggcaccacggggcatacggagctggaacgtcaggagattatggatgcagccgcatccatcccgatcgtattcgcgtccaactattccgcaggagtgaacgccctgttctggctgacgcgcaaggcggcccagatcctgggcggcagctgcgacattgaggtgatggaaatgcatcaccgccacaagattgacgctccttccggcacggcccggacgctggcggaaatcctgtccggcgccattggcaggaattatgaagacagcgtggtttttggccgcgaaggcctggtgggtccccgtcccgccaatgaaataggcatgcattccctgcgcggaggggatgtagtaggagaccataccgtggtgttcgcctctgacggagaacgtttggagcttacccacaaggcatccagccgcatgacgtttgcctccggagcggtccgtgcagctctctggctgcagggcagggaaccggggctgtataccatggaagacgttctgggcctttcccaattataatttttccgcatcatggccgtccccccttcccggaacggccatgatgccttttttgctgatgaagagagccggcatcgcactgggatccaatatgggggacaaaaacagcctgatggttcaggccagggaccatctgctgaagatgagcctgtccgacgatcctttcctgcaatcctccctgtatgctaccagtccgcagggatgtccgcatggcgcggatgattatttgaatgccgtggtggagttcacctggcccggtacggtggaagaactgctggtgcattgccagggcatagaacgcgccctgggacgcatccgctccggaatccgctgcgaaccccgtacggcggacgtggacatcatttacgcgggggacatggtggtcaacgatccgccccgcctgattctcccccatcccagggctcatttgagaaaatttgtcttgaagcctctttccgacatcaggccggacctcattctgccccgccaggctaaaacggtttcttgcctgctggcggaactggatacggatgaggctgacccgctcctggtatcggaacgctggtaactgcatgtttatagaacatcatgaatcaatctcttgaaaaagcggaacgcatccgcgcctgcaagaacaggcggcacgtgacgctggtgactgcttatgactaccctacgggccgccttctggatgaggccggcgtggatattgtgctggtaggcgattccgtgggaatggtgcttctggggtttccggataccacccatgtgacgctggaccacatgattcaccatgtggaagccacggcgcgcggcgtgaagaatgccctgctggtgggagatatgcccattcatacctatgatacggtggagcaggccgtgcagtctgcaaggaggctgttccaggccggagcggacgccgtcaagctggaggggggagccgcccaggcggaaaagatccgtgccattgtggatgccggcattcccgtggtagggcatatcggcctcttgccgcaaaaggtgctggaggaaggcggatataaaatcaaagggaaatcctccgctgaggaggaagccctggtaaaggatgtggaagccgtggcggaggcgggcgcctgcgctgtggtcgtggagggcgtgacgcctcatgcggcccgccagattaccgtgcattcccccattcccacgctgggcatcggttccggcgcgcatacgtgtgacggggacgtggtggtgattcatgacctggtgggggcgttcccgtggtttgtcccggccttcgtcaaaccgcgagcggatgtggccggcagcatgactgccgccgtcagggaatggatgaaggattcctatacggaacccggctccatcagttcataacagttgaccgttgcctatgctggtattttctacatgctggaactcccaccgccaccaggacggggaagagatgattgatgaaatcctctccctgggatttgaccatgtggaactttcccacggcatcaagctttcccttctgcccggcatcatgagggcggtggaagccggaaaggttcaggtggccggggtccataattatttcccggcacccatcgacgaggtgggggacgctccggacagcaggccgtttaccgcagatttgccgcaggtgcgcgccaaggcgattgagctgacgaaaaaatccatggagcagggggccgccctgggcgccggatacattgtgctgcacatggggacggtggaacctctggtgaagcgtacggatacggctcatttgcagagcctggcgcgtcagggaatggtggaaacggagtcatttgccggaaccaagggagagtttgtgcgccgccgcaaccggcttgctcccgtttatctggaacgtgcccgtgaggccatccggcagcttctgccccatgctgcggaacttggcgtaaagctgggcattgaagggcgcagccattatgaacaggttcccagcgaggatgaaatgggcctgctgatgcaggaatttggggaaaatcccttcatcgggtactggcatgacttcggtcatattcaaaggaagcacaatctccttatattgaatcatgaacaatttctccgcaggatgtcttcccatttgataggtgggcatgtaaacgacgtcaagtggccgtcgcgggaccaccaggttcccctgctgggcggcggagtgccgtttgaacgcctgctgccttttttcccgcatggagttccgctcgtctgggaactctccggacgcgcttccgcggaggatatccgtgcggcgcgcgaattgtggacggaaaagtttccggagacgctggactgaccatcttgtgattgtaaatccggctcattggatataaagtcggcacgatgatagacaagacgacatcccgcgtcattctgggccttctgggaacggcctgcatcctgattacggcgtttgcctggtataaaaccagccatgccgcctctccggatgccgggatgcgccataatatttatgatgaggatgttccccggtctgctccggtgcctgtggattaccggatgattttgctgacgccccaggagctggcaaaggctccgctggcggatgcgttcacgtcccctctcggagatgaaaatggcgcctttacctatgttgcccagggactgggtgatatgaatgccgcccgtggagggaggcataccggacaggatttgaatgggattggtggcgagaacacggatgagggactgcccgtgagggccgccggacgcgggttattgatttacgcgggagagccttcgccggactggggcaatgtcgtcgtcctgctccaccgcctgccggacgggcgttttgtgcagagcctgtacgctcatttgaaaaccgtcagcgacattcctttgggggcgctggtggggcgcggagagcagatcggcacggtcggaacggcgcacggcaattatctggcgcatctgcattttgagatgattgaatccatcgcccatgaagcgggaatgccgggctatggaaaaacgacgttcaaccggatcaatccggatgaagtattgaaacgatacgctccctccccggaaatgatgatgcctgatcccgttattgccctgaaacaggttcaaatggcggcgggatgggaaaagctgctggagaacctgtacaaggacaatagtatggaagcgctggataaaatccttccggacgaccgtccggacacggaggaaaagggagaccgctaaccccggcgttttccccgtcaggagcgtgtgtccggatttttggagaccagctcctgctgcttcctggtgatttgcaggacgcagaccagccacagaatgctggccgccgtcatcagcgagccgatcaccagaaatgccgtcaggtaatgttccgccccaaaggggaagagcgcgcacagggtcaaagccgtggtaacgagcagatacagccgcagcgaccgggagggggcttgcagcatccatgccgccggattctttgaagcccggtataattcctgaaggatcagggcattgagcaccatgccgactaccggcatgcagctcaggaggacgctcaggaatggcgtgaaccgcagccccggaatttggaagccctggacattggcggatgcccggtacagccagatcaactggatgagcagggaaggaatgaacaggatgctgaaaaggaaaaccagcggaaccgcgaaggacggcaggtgagccatgttctgctggatgagcatctggatttcctcataattggtgacgttgttggagaaaacaatccagctgctccagagcatgaaaggcagcagcacgaagcacgccaggatggataatttggcaagcccggccagaggataacgcaaacggtattcctgttccgctggctggttttcctcttctgcctcctgcaattctttccggacgggggacattgacggcagaacctggtccacaggctgccatccatccatgccctgtttccaggtgagcgttgttgagtcgatcacgccctgtcccagaaattcacggacttcatattcggaataggctctcggctgggaatcgccggggagtttcaggaagtattcactcattacctgtattttagaaaaagaagcaggctctgggcaatgggaatttgacggatgactgataaagtcccatgccaggtgcctggccttgaataaaagccatgtcgcaagtcgtcagagcgccgggggctattaaatttccggaatggataggctgcttttcctgtgcatatctctccgtacgaacaagataatgctgttgtgcatggaaccgcaggagagagggctcaagctggtgttcaagtaaaagtacgggggcaggaaagtttatcaacaaggtcgcggaatacacaagtcggaaaagagaaagaccttgtaacatgaatgaattacaaggtcttgcaatggggaaatatggtcgagctgacaggattcgaacctgcgacctcttcgtcccgaacgaagcgcgctaccagcctgcgctacagctcgttgtttgtggtgcggcgaagtctacggttgaaaggagggtttgtccagttttttttattcgccgcggcacttggttgtgatacggtgccggggttatgatggatatgctggtacggctgtatgatttgcccgatattgaagaagagctgcggaagctggagaaggacggcattttgatccggcggccgggggcttatgaacgccatttggtggctggatgggtaggccggaatttttctcccaagtgggtgagtgaaacgaagactgcattctgccgccagcccatttcctgttatattgccacacgggagaagaagattcttggctttgcctgctatgacgtgacggcgcgcggttttcttggccccatgggggttgcggaggaggcgcgcaagagcggcgtgggcaaggttttgctggtttccgcattgaacgcactccgtgagatggggcatgcctacggcatcatcggcggggtagggccggccgatttttatgcccggacggtaggcgcgatgcccattgaagggagctctcccggcatttatgtggatattctgccggagccctgattccgcctgttgcggaattcatttccggttccggatggccccttttccggcccatccaaaggatggaaccggaagttgttattttttataccctaccggatggcagagcatgggcgtttggggggaggccagtttcagggcttttgccagggcctccttgttcatgctggcccgtgggtaggtagccagtcccgttccggagcagaacagggagatgttctgggaaacgatgccagcgtccatggctgcccagggttccgccgtgtccgtcacaagaaccaggcaaacgggcgcgtccgccgggcgcgcgtccccgtcgcttacggggaccatggcgtgggccttgtggtcatagaggtaggaggcgtctttcgtgcatacgtaaattttgacgtcctgccggttcatggcggacggggcggtacgcttgccggattcctggcggttgattccgttggcggcccagagcaggtctgacagatctttttgggagagcattttttcagagaagctccggatggattggcggtcggacagggctttcataacgggcgctccccgttccaggtccggcttgtccagtttgacggtttccgcggcgtgaagaagggctgtggaggacagcccggcggcgaggagggacaggatgatttttttcatggctttgcggcgggagtggttgacggatgcggatgttccgcattttcccattagccggaatttaacatggggagggagggctacaaggtttttgtgcgcttgtttttgccgccatccgtcggggcgccgcagggccgtaaaaaaatcggaaggagtttttcaagaaaagccttgagttcttgcgtgaaactggtattgaaggcaaccgatttttcgcccggcgggggaaggcgccccgattgcccgccggccaataaggggccatgagaaaaatcggcaatactaactcatcaaccatttaaatgagcacaactgaactggcggaacttattgacagcaagttccgcgaattgcgtgaaggttccatcgttaccggaaccatccaggaaatccgtccccaagtcgttttggtggacatcggctacaagtccgaaggcgctatttccatttccgagtttgaagacgaggaaatcgaagtgggggaccagatcgaggtccttctggaacgcctcgaaaacgacgaaggcatcgtcgtcctttccaaggaaaaggccgcccataagcagaactgggataagatcgtgggcgtgtaccgcgatggcggcctggtcaagggtaaagtgaagagcgtcgtcaagggtggcctcatggtcaacgttggcgtggaagccttccttcccggttcccaggtggatatcattcccccgcgcgacctgaacgaatacgtgggcaaggtttacgaattcaagatcgtcaaggtgaacgacgaccgcaagaacatcgtcctttcccgccgcgaagtgatcgaagccgaacgcgccgaccagcgccagcgcttccttgaaaccgtcaaggaaggcgacaaggtggaaggcctcgtgaagaacatcacggacttcggcgcctttgtcgacctccgcggcatggacggcctgcttcatatcacggatatgagctggggccgcgtgaaccacccgagcgaaatgctccacatcggccagtccctggaagtcgtgattctggaagtggaccgcgaaaaggaacgcgtttccctgggcctgaagcagatgacggacaatccctgggcggacatcgaacgcaagtacccgatcaattcccatgtcaagggccgcgtgaccaagcttctgccttacggcgccttcgtggagctggaaaagggcgtggaaggcctggtgcacgtttctgaactgtcctgggtcaagagaatcacccgtccgagcgacgtgctgaagctggaccaggaaatcgaagccgtggtgctttccatttccgtgaaggaacagaaaatctccctcggcgttcgccagctggaagacaatccctgggcggatatcgaatcccgcttcccgatcggcaccgttatcaagggccaggtccgcaaccttactccctacggcgcctttgtgggtctggaagaaggcatcgacggcatgatccacgtgtccgacatgagctggacccgcaagatcaaccacccctccgaagtcctcaagaagggcgacgaagtggaagccatcgttctggaaatcaagaaggaagaccagcgtgtctcccttggcatcaagcagcttgagtctgatccgtgggaatccatcaacgaccgcttcaaggtgggtgacatggtgaccggccaggtggccaagatcgccagcttcggcgcctttgtgaacctgaacggggacatcgacggcctgattcacatctcccagcttagcgaagaccacgtggaacgcgtgaaggatgtgatcaaggtgggtgatgaaatcaccgcccgcgtgatcaaggtggacagcatcgaacgccgcatcggcctttccatcaaggccgtcaattacgacaccgagcagctccgccgtgaaaccgcctcctttgaagctctccgcccgagcagcgacatggtgggcctggaacacgccttcaacctggctacccgtgaaaacgaagaatggagcccttctgaagagaagtaagcttatctacgtaattcactgattgatttaaccgccgcgaatagtgatattcgcggcggttttttttctcattccaaattaggatggaaaaagtcttgagttagttccgcctaagggattaactgttctcttataccatgttggagctgaccaagagcaatgaggattatctggaggccatcgggctactgtctgaaaagagcggaacggcccaggtgcgggatattgcagagatgcttaaggtgaagatgccttccgtcacgtctgccgtcaagcagctggcggacatggggctggtggagtacacccagtatgctcccgtcaagctgacgccccagggccgcagaatcgcgggaaaaatcattgtcagccacggtattttgtttgatttcctgagggaggaactggctcttccggaagaacgcgccaatgaggttgcctgccagattgagcatatcatgacctttgaggagattgaaaagctcaagtcctgccggatacggccttttgagggggccggggaagattctgccggataggttttagttccggtggcgggcgggatttggaccaagcctccgttgcgctttgggtgccggctatccgggaaggacgggatacctccatacacggccctgtgattcgttcaggctgtgggatatgtcctttcccctgctttttccgatagccgcactgccgggaacaaggacctcacgtcccttgccagaatcttatggagtatctccatgagaaattttccttgaaaaaagaatgaccgggagaatcggtattttgcccttttccgttcaggtgattcgtgataggttcccgcgcatggatccccatatcgctgcagatctctcggcgctcgacacggctgttttgcacagccgtctttccgagctcgggagctatctttgacctggacggcattcaacaacgagtggccgagttggacgaacgcatgagcgctccggatttctgggatgaccagaatgccgcgcgggcgctgatggcggaagtgaatcccctgaaacacaggatggaggcgttttccgcattgaaatcccgtctggaggatattgacgctaccattgaattggcccaggaggcggatgacgacgacctgggccgggaggccgtggaggagtttgccaaatggcagaagtccctggcggattttgagctgctgaccttgttgaacggcccgcaggaccaggcttcctgttatgtgaccattcacgccggggcaggcggcacggaagcctgtgactgggcgtccatgctgatgcgcatgtacatccgctggtgtgagcgccgcggcttttccgtgacttatctggaaagcacggacggggatgacgccggcatccgttccgtgaccttgaaggtggatggagagtatgcttacggttatttgaagaatgaacgcggcatccaccgcctggtgcgcatttctccctttgattccgccggtaagcggcatacttcctttgcctccctggacgctacgccggaggtttccgattccatcagtattgagattctggacaaggatttgaaggtggacacctaccgttccggcggcaagggcggccagaatgtgaacaaggtggaaaccgccgtgcgcatcacgcacattccctccggagtgatcgtagcctgccagaacgaacgcagccagcttcgcaacaaggaggaggccatgaacatgctgcgcgccaagctgtaccagattgaggaagacaagaagcaggcggaagctgaccgccagtacagtgaaaagggggacatcggctggggcaaccagatccgttcctacgtcttccagccttaccagatggtgaaggatttgcgcacgggcgtggagtccggcaacattcaggacgtaatggacggcaacctggaccccttcattgaggccatgctgcgcggccacaagcgcgaacgctgacgttttccttcccttcttatggccgctggactgattattgacgttctctccctgttcccggagatggtggaagcccccctgggcggcagcatcctggggaaggcccgtgaaaagggtctggtggaggtgcgctgccataacatccgtgactggacggtggacaagcaccgcaagacggacgactacctctgcgggggcgggcagggcatgctgctgaaaccggaacccatttttgccgccgtggaggaactccgcaggccggaaacgcgcgtggtgctgatgaccccgcagggccgcaccttcaatcagtccctggccggggagctggccgcatccggcggccacctcatcattctctgcgggcattatgagggggtggaccaccgcgtggtggaagagctggtggatgtggagctgtccatcggggattatattctcacgaacggggcgattgccgccgtggtggtgattgatgccgtggcgcgcctgattcccggtgtgctgggggatgaacgctcttccgtggaggagtctttttccaacggtcttctggaggcgcccgcctataccaagccgaacgtgttccgcgggctggccgtcccggacatcctgctgggcggcaatcatcccgccattgaaaagtggaagcacgggaagtccctagagcgtacgcggctgaaccgtccggatttatggagggagtggctgagaacgcatccggaggatgccgtggaatgagatatttggccgacgcgtcaaatttctcttgccaagaccggggccttccgttataaaaccccgcctgccaccgtgagggtggtgtaaagcacctttctgaaccttttacaaaacacaagatcatgtccaagcattccagcctcaaagcaaccggtaccgtaggcggcaagcgttccgtcctgaagcgttttgaacgcgtcaagcttctcaaggaacgcggcgaatggaagaagggccaaagccccctcggcctgccgaagaccaagcatgaagcttaagcctgcttttaccccctccggagagtttcccggcggagtcatgcacggcaagtcattttcctaatacaggaagcctctcggatgtctatgaaccgagaggcttttttcttccggcaaagaaggctttccctctttttggggcgcgtgaattgccgtaatacaaacaatacaaaaccatccgctgagatagcggacattataccaatatgagtgaagaacaacatggctccgaagaaaacggaggtatccgcattaataaattccttgcatcctgcggcattgattcccgccgggtggctgacagactgattgaggaaggacgcgtggaagtgaacgggaaggttattgatacgcccggaatgagggtgacggagaaggatttcgtgaaggtggacggccgtcacatgactcccatggaggaggttgtggtgctgctgaacaagccgcgcgggtacgtatgcagccgtgaagcccagggggccataggcactgtttacgacctgctgccgccgcgcctgcgccatctgaattacgtgggacggctggatgcggattccgaaggcctcctgatcatgacgaacaaaggggagctgacccagaccctttcccaccccaccggcgggattgaaaaggaatactgggtgacggtagatcagaattttgacaattccgtgctgatgcagtttttgcgcggagtccgcattccggaaggcaatgccaaggccaagtacgtctgccgcgcttccgcgcgccgcgcctgcattgttctggaacaggggttgaaacgccaggtgcgccagatgttccaatgcctgggcctccgtgtccgcaagctggtgcgcgtgcgcatcggttccctgtgggggggcgatctggaacccggaagctggagattcctggatgatgcggacgtagccctgctgctgaagaatcctccccgccagcgcaagtatctgggcgcttcccagcttgtagccgggactcccgccaagggcgaacagagcgggaaagacaatgattccgatgaaggttatgtatttaatccggaagattttgaggctggggattcttatgaacctactccggaaatgaaaacccgctttgcggatacggaagacgaggatgaaatcaaggacggtgaagaccttcgggatgattccggattccgttcccgcgaacgccgggaagatggtttccgtggacgccgcgaaggcggtttccagcgccgggaaggcggcttcggtggcagtcgccgtgagggaggattccagcgtcgtgaaggaggtttcggaggagaccgccgcgagggaggcttcaaacgccgtgaaggaggatttggcggagaccgccgcgagggaggtttccagcgccgtgaaggcggcttcggaggagaccgccgcgaaggaggtttccagcgccgtgaaggcggcttcggaggagaccgccgcgaaggaggtttccagcgccgtgaaggcggcttcggaggagaccgccgcgaaggaggtttccagcgccgtgaaggcggcttcggaggagaccgccgcgagggaggtttccaacgccgtgaaggcggcttcggaggagaccgccgcgagggaggttttcagcgtcgagagggaggatttggcggagaccgccgcgaaggaggcttccagcgccgtgaaggcggcttcggaggagaccgccgcgagggaggttttcagcgccgtgaaggcggcttccaacgtcgcgaaggaggtttcaaacgccgcgaaggcggtttcggaggagaccgccgcgagggaggcttccagcgtcgtgaaggcggttttcgcaaaccgggctttggcagcagatcttccggcggtttctcccgcggaaacaggggccgttaatgattgacttgttccggtatgaagaagcagtgcaaatggtggctccttgccggattgtgtgggctgtgcctcgttcagcctccgcttcatgcgtctcaggatgttccctccccggctcctgccggtgagggggattttgggacgtacctgtccagtcttcaggagaaagcccataacggggataaagctgccgcccgggaactggcagtgcattatgatgtggaggggaatgccccggagacgtccaaatggatgtctgaatacgtttccctggcggagaaggaggccaatggcggggacgtggattccatgctggatttgggcaagctgttttatacaggcagccgcctgtaccccaagaatcttgaaaaggcccggtactggtttgcccgcgccgctgacagcggcaatgccgcggcccagtaccaggtggctgtaatggcttccaagggaacaggcggtccgaagaatgaggaaatggcggcccgctattatgaaaaagccctccaaacatggaggaaagaggctgacgccggcgattccaaggcggcgttgtgggtggcccttgtttatgaacggaagctggttccggacagctctccggaaaagtcggttccgtatctccttcatgctgcggaaagcggcaacctgacggcgcaggggcttctggcattcaagtaccgggatggcctgggcgttccgcaggatgcggccaaggccgtggaatggtttgaaaaggcggccggacggaaggatctgggcgccgtcatggaactgggcatgatgtaccgggacggcaagtatatgccccctgaccgggaaaaagccctcaactggtttgaaaaaggcgcggaatggaaggatccgtacagcatggctgccctggcggacatgctgatggaaggctctccttccggagaacaggcggcgcgcgcgctggccctgtaccgtgaagccgccgccatcggttacccccctgccgccctgaaggccgcggaattgctccagaacgggaagggcggggaactggatgcggatgaagcctacaggctgctgcggcgcgcggcagacgcaacgggggaccccaaggccatgtacatgctggcccaggtgtattatacgcggggcgatgatgcgcagggggattccctgatgaaagcatccgcccaggcggcttatctgccggccatgaaccgcatggcgcgcctccatcttctgccgggcagcaccctgtcctggaatccggtgctgtcctattattattggaaccaggccggagaactgggggatgaaggggcggcttccgccgcgttctggctgctgtggggcagcatggctgcgctttccctggtgatcttcctggtcgtttggcgttttcaccgttttgccgtcagaaggcttgcggagcagcaaaaacaggaacagcaatcctctgatgacgcatgaagcgtattatgaggtatccggcatgaaaaaaatctgttaaaaagaccgtagcactccatgatgaacacgttagctatttttggactgggaacgccggagattatcgccattctggtgattgtcttcctgctgttcggcgctaagaaactcccggaattcgcccgcggcctgggcaagagcttgggagagttcaagaaggccaagtccgagtttgaagaggagctgttgaagacggagaaggaaaccatgagcgatgctcccgcctccaagccggagtcccgcccctctcccgagctttcccagcccattgacgtggaagcggagaagccggcggaaaccaaaccggaagacaagtaagtttttgcagcctgacggcggcatgtacagggcgggagattcccgccctttttgtaccctggccgcaaaggttttctgaaaagtgggagggagcgtcttgaaaagccatggcttttcaagaggcgtgcgcgttcataacggaattttcctcagagagttcgtgcgggttctttttcccggtagttatacaggtattatttctagacgcgggatgttccggttttcagtcatgatgcaggtccggggcgttgtgtgtattgccggataagtttttacaagggccggaaaccgggcggggatggaggtgaagcttgacgtttgcagaaatgcggtacggagcggaggacggttcaaactgtagttttcttctccaaggctggcggagagagaaagggcatgattcttcttgattgacgtatcgcggtttccaaaagagctgccgtttccggcgcgggaaattgtttacgccccggcagtttccttctttctcttttcagaggggcaagtcctttgaattgcaagcttcaggcattgatttcttgcgttggccggaggcttgttgtacacatgtattaatgaaaattcatttttgcggagcggcgggtacgacgacggggtcccagcatttgctggaggtgaacgggagcaggattcttctggattgcggcatgtaccaggggcggcgtgaggaggcctggcacatcaacaaggattttccctatttttctccggcggaggtggatgcggtggttctttcccacgcgcacatcgaccattccggcaaccttcccaatctggtgaagcaggggtttcaggggaatatttacagtacgtttgcgacccgggacctctgccagctcatgctggcggacgccgcccgcatccaggagcacgattgcgcattcatcaataagatgaacaagcgccggggcattcatcagccggacgtttaccccacttattccgagcaggacgcggaacggtgcatgcgccagttcgtgaatatcgggtatgatcggcccattcccgtcgttccgggcgtgacgctcacgttttatgatgcgggccatatcctgggggccgcccaggtatgcctggatattgaggaccgggaagacggacggaagaaacgcttcctgttttccggggacgtgcgtggggataatgaacttctccgtgaccccgtgcctgttccggatgtggacattttgctgatggagagcacctatggcggacgtttccatgaggctccctcccgtgatgacgagaccttctgccgggccatcaaggaggctctggagctgggcggccgcgtttacattccggcttttgccgtggaacgcacccagcagcttctttacctgctgaacagggcttatcatgaaggctcgctgcctttgctgcccgtgtatgtggacagccccatggccgtgggcgccacggagatattccgcattcatccggagtgcttcaacaaggaggtgtacgatttcctgttccgggaaaaggatccgttctgttttgaacagctgcggcttatccgttccgtaggggaatcccaggagctgaacaagatgaacgggcaggctatcattatttccgcctccggcatgtgtgaagccgggcgtatcctccaccacttggcaaacaacatcggcaacccgaagaatacggtcctttttgtgggctattgcgcggaacatacgctgggccgcaagatcatggacgggtggaaggaggttcccatcctgggcaagcagtacactgtccgggccaggatacgggagatggattccttttccggccatgcggaccatggagagctgctggaatattttgacaagaccggaggacccaagagaaatatcattctggcgcacggggaggagaaggcctccctcgccctggcggaggctctcagggcgcggcaacccaatcccgtttccatcgcacaactgggaagcgccatggtgctttgacgttccggagcgccggggccttcctgctgcgttttttttcagggtacgcctctttcatggcggaggcgcccggcgtgttccaatcaagtcatgacggcaggatggctgtgctgcccgcttgacccggtgtgtttgcggggctagcgtgcaggtatgtcttccttgtttattgaatatcccaagtgcacgacttgccagaaagccaaaaaatggcttgatgaacagggcgtttcctatgaggaccgccacattgtggagcagaatcccacggaggaggagctccggacctggattgaagagagcggcttgccgtccaagaggtttttcaataccagcggcctgctgtacaagagcatgaatttgaaagacaggcttcccggcatgagcctggaggaccaggtggccttgctggctaccaacggcatgctggtcaaacgccccattttaatcaccaacgggaggatctgcgtcggcttcaaggctgacgaatggaaagccgcccttcatccctgattcccgccatgcccctgattacccgcaccaagcaaggcgcagccaatttcggtccctgggagaacgtcgtcagggtgctgattctggtatggttcatgctgtacacgctgaatgccattccggacgttcacccgctggtaggccgcattgcggccaaggtgaattactggatcagctatttctttgtgtttgagtacatcctgcgggtgctgtgcgccaagccgcggaaggcttatatcttcagcggcatgggcattctggatttcatcgtctgcgtgccgttcctgggcatgtttttcgggttggactggcagattctttattccctgcggattgtccgcgtgctggccatcttcaagctggcccggtttaacgaaactgcggccagttttaaaaaggccttttacctgatccgggatgagtttttcctgttcttctccgtgatcctgttcatgctgtacgtcacgtccctgggcatttacattgcggagcatgaagcccagccggagaagttccgctccttttttgacgctctctggttcgccgtggagaccctgagcacggtggggtatggcgatctggtgcctattacgcccatggggcgcatttttaccggggtgatcatgttcattgccgtatccatcatcgccatttccacgggtctcatcacgtccgccttttcccgcgtatggcagcaggagaacgtttttgcgcaccgccgcaagcggcccgcggacaaggccgcggctgacgccggcggcgaagaaggggaggccaaatagccccccggtcttttttgagggctgctcaactccggtccatggatttttgaaacaggcttgaaaaggaacggccgcctttccacggggaagggcggccattgcgtaaaagcgggaaaagagttttccttagctgttgtacatttccgtgtagtactggtccgccatgcggtcggagtcgaactcggggtagatatccgtcatcgcattgaagacgatgtccatccacttgtcgttgtgatcgtagtagagcggcagaatcttgtcgtccaggatgttgtagaagttgtcgcggtcggagcggtcgcgggcttccggagagagatggggagcagcttccggaatgacgaagcagttttccccgtccttggcgaattcacagatccagccgtcattggtggagacggagatggagccgttcatggcggcggacatgccggaggtgccggaggcctcccgggtgactacggggttgttcagccacacgtcggagccgttcttcaggtagcggctcaggcccagttcatagccggtgagtacggcggaacgggggtatttggccgtcatgtcattcaggcggttgaagatttcaatggcgccgtggtccatcgggtagggcttgccggcccagatgaattgcaccggatagttggtgcgctggagcatgcgttcaaacatggtgggattgccggtgaccaggtccggacgcttgtaggccgcaaagcggcgcgcccagacgatggtgaggcagttcgggtcaaaaacgcggcccgtctgttcccccaccatgcggaagagggcttttttcagggcgcgcttgcggcggatgaaggcctccttgttgcgggcctggaaggcttccgccagttccgggtcctgccagtatttctggttctgggcgttcgtgatgtggatgatggggcacacgccttcatagtccttccacatctggcgggaaacttcgccgtggagcttggagacgccgttggcgatgtgggagaggcgcagggcggccagcgtgtagttgaacgtgttgtccgtcaggcctacggcggcgcgcacctgttccatggaaagcccgtcgaagaaggagaacgtgttcatggtgttcacgtccatcttttcattgccggcttcctccggagtgtgggtggtgaagacgaagcgcttgcgcacttcctccacgctgccggttttggcaagcacgtggaaggcggcggccaggccatgggcttcgttcaggtggtagatttccggttcaatgcccagttcgtcaaagaggcgggcgccgcccttgccgagcagcacgtactgggcgatgcgggtgaagccgttggcgtcgtacaggcggcgggaaatgttgcggctttcctcgtcgttttcctccaggtccgtggaaaggaagaacatgggggcggtgccgaaggtttccggattcaggaagtaggccttcacccagacgggcgcgccgcagacgtgaatgaggaatttgatgttgtggtcttccaggaacgggtagttcttgcgcatgtattgcgtggccatagaaccgtcttccgcccggatctggttgtagtagccgtagctccacaggatgccgacgcctacgaggttctgccgcaggtcgtgcgcgctgcgcatgtgggagccggacaggtagcccaggccgccggagtagattttgaatgaattgtcaatggcgtattccatggagaagtacgctacgctttttccgtatttggggtcgatttcatacggatgttcgaaaatggtgggtaaaaatgatttcgccatggttctgtaagtagagtaaagcgttcaacaggtgaaccgtatgccttggtatcatgattcgtccatattggaaagggcaaattgcgtgtgtgtctgaattgttgattgaacaggaatgcctttccggagtttgctttccgaggttttaccgggccggggagaaggggatgcggcggtgccccagacctccgttccggaagcggttttccggggcgccggaaacgaattttgggcttgccgccgcaggggaaaaagagcatgaatggggggcatgaaagctcttgtaaaaacgcaggcaggccccggtttggaactgatggatgtccccatgccggaagtcggcccgaacgatgtcctgattaaaattcataaaacagccatttgcggcacggaccttcatatctggaactgggacaagtgggcccagcagaccattcccgtggggatgcacgtgggccatgagttctgcggcgtgattgaatccgtgggttcctccgtaacggaatacaagcccggggaaatcgtttccggggaaggccacatcgtctgcggccactgccgcagctgccgttccggtcagaagcacctttgcccgaacacgaagggcgtgggcgtgaacaggcccggctgctttgcggagtatctttccattccccaggacaacgtggtgcgcatccacaagagcattccgatggaaatcgcctccatcttcgaccctctgggcaacgccgtccatacggccttgtcctgggacatggtgggggaagacgtcctgattacgggcgcgggagtcatcggctgcatggccgccgccgtctgcaagaaggccggagccaagacggtggttatcacggacatcaatgatttccgcctgagcctggccaagacgctgggcgcggaccgcaccgtgaacgtgacccgtgaaaaactggtggacgtgatgaaggagctggaaatgacggaagggtttgacgtgtgcctggaaatgagcggcgccccgtcctgcctgaaagacatcatcgacaattcccggaacggagccaacatttccctgctgggcatccagccggacggctccagcatcgaatggaacaagtttatctggaaagggctgaagatgaagggcatttacggccgtgaaatttttgaaacctggcacaagatggattccatgatccgcagcggcctgaacatagcgcccatcattacgcaccggctgccctacacggaattccgggaaggctttgaggccatgaattccggcaagtccggcaaggtggttctggactggattgtctgatttatccgcttttttaccgtgtaacgaatgccccggcttccagatggaacgccggggcattttttaagaaggcacaggatagggggtgaggatttgctcccggagcgtcaagcggtttttctgggcgtgggtggcgtttgggcatcccgggcccgggcgcggcgttcctccttcatgcggcgggcgtagctgtcgtcgtcttcctcaaaggcgtccggatgggtcagccggagcctccgcaccaccttgtcatggtcctccggggaaaccaggtccgtgaacaggcctccgtgaagatggtccacctcgtgctgcaggcagcgcgccaggagcccgttgcatttgatggtcacggtgcgtccgtccatcagggtcaggacagccttcacgcaggagcggcgcaggacgtccgcatacaccttggtgatgctcaggcagccttcccggtacggcacattcctgccgaaggggtggaggacaggattgatgaaattcaagggcatgatttgcgccagcgtggccgggcgtccgtccacttccagccatgtagtagtggcgtccgtgggcggaatattgatggtgaccatctgaatggcccttcccacctgcggagcggccaggcctatgcccccctgggccagggtttcctgcatgtcgtccaggaaggaaagaaggtctttgttgatgtgaaccacggggctgcattcctccctcaaaagggggtgtccgtattgaagaatgtcaagaatcacggcggataggatggagttggtaataaggtgtgacctccgggttcgggagagtgttcatgatatttaaaagaatatttccgcacatcaagaatgcgggaatgttttttccggatgaaatgaaaaggccttgaactttggggacgctttcttacggtaaccatgttgccacgatgcgggccgggctccagagcctccctcatcaacgccgctttctcatgaaactcagttcccgtttttccctgttcctgaatttgccgctgttgggaggcgcgtgtttgctggcgctgtgttcctgcggggacaaggaggaaggggaaagggctgcggaggaaaaggaggctgaaaagctttccccggtggaatcctatgaagaactgctttccctgcgcctgaaggacgtggagcagatgacggatctggtcgcttccatccaggaccgggctgcgggagaggccgtgatggtggaactggggcggttgacggacaggctgaagctttacgacatgaactgcgggcggctgatgattctgaatccgcgcgtgcatgaagagtcccgggaggttcacccctccttccattccattctccgggagcgcgtggacaaggcccgcgaccggatgatgcaggcgatgctgaagcttcatgaactcaagtattacgattccgccgtcatcagggatgatctggaaaagtacggtctcagcctgacggacgaacggatggcccagtatttgaacgacaggatactgccgttcctgaaagcgtatctggagcagtacgccaccatggtggacatgctggaggggattgacaacaaggtggctgcggaggcttatgccatgtccgtagcccttcaggggcgcatggtcagggaacagatggacaatatcacccggctggagcaggagtacggagaatggctccccggttttgaacggcactgccacgacgggttggagaagatgaggagaagggcggacgagaaccgcaaacgcgctttccgggcgctcctgaagctggtgacggccagaatgtatgattccccgtccatgcagaaagcagtggtggggcttgagatggaacagcctaggctggtggattttcaggaattctgggctgatcccatcatgaccatggaggagttctgcctgtgtttggaaagaatccagcatctcctgcgcggcattaaggataccggaacggcggaccagcgcgccatggagctggtggaagtggtggccaggctgaaaaggctgcgctacgtcgtggatgattttcagaaatctggccgcatgaaccaggtaaaaaccagggatttggaacgcatcagccgccgtgcggaggaagcggaaatggccgtttccagtaccatggcccatcttatcgtggagacggacgttgtgacccgttcccctcttctttcccgcgccatgggcttttaccgctatgtgatgtacacgcactgagggctgcatgccggaaagcgcctattgacatccggcgtcggaacgggacaatctgcccatgatggatgttgatttttccggaagtgccgtggtcgtgacgggcggagccggcggcattggccgcgccattgcggaggcttgcgccgcagcaggcgcacgcgtggcggtgctggatgtgaagcatgaggaaacggcctccctgctggatgaattgccgggagaaggccatctctgcgtgacgggtgatgcgggggtggaagaggacgtgcgtttttttgcggaaaaagtgttggagcatttcggccgggtggatgtcctggtaaacaatgcgtgcatcacccgccacggcattctttccggctgctcttatgaggactttaatgaagttctgcgcgtgggcgttgctgccccctacctgctcagccttttgttccgtgatcatttttcccacggggcttccatcgtgaacatcgcctccacccgcgcttccatgtcccagaaggatacggaaagctacagcgcggccaagggagccctcatctccctgacccacgctcttgccatgagcctcgcgcccctcggcgtccgggtgaacagcatcagccccggctggattgacacgggggcctttggagccttgtccccggaggacggcctccagcatccttccgggcgcgttggaacgccggaggatatcgttcaggctgtgttcttcctctgccgctccggcttcgtcaatgcggaaaacctggtcattgacggcggcatgactcggatgatggtgtatcacggggatgaaggctggacgttccgtccggagccgccggacacggtcccctcatgacggcagccggcggctgcggcaggtatccggagtttcccgggtcatggaatacgtacacgtgcgggaaaaacattgcccgcatgcggatgaagcaagggcgggcacgaacgcggaggcgagtttttgtttggaacggcctggttcgtcattccccggagcacaggttatacatgcccaggcagggggtaacgacaatgctgaccggaataagaaggatattggcaatcacggtaccgggggcgtcaatcacgcagctctgtgctcccgccagaattctccggcctgtggagggagcgctgatgatctttacggctgctacggtgggagaagcgttttctttcctgctcaagttcaggtagggaagggtaatttgatgcgctccatacagggaaaaccggggaggaacggtgaaattctcttcaagtaccatgctcaggaggtctttgtattctatgggatcgggaaggtctttcttgttaagctgcaaaaagacggtctttcccgttcccggaatatcctccatttgtgaaatgaagtctgactgggccatgggcggtccgatgaccggagtttccttgcgctggtcgcattgaacggctttgatgtaaacgaagccgtttttcacataggcgcggtcatccagttcccagttgcggtaaacggttccggcgttcagcgtctgggcggccgtattgacggaaatgcaggcgcacggcagcaggaatgccgccggcagtaggaggaaacgtttcatggggtactgccgtggatagcagtatactgactgacagtcaatataaaataagaagagccgctcctttccggagcggctccaagattcccttcacgggagcagaatgataaaagtcagcgaatggtgacgcgggggtcgttcgccagaacctcggccagttcgtcccagccgtcttccgtctggagctggaacatctggaggtaaacggacgctacgccggcagggtatttttcaaacaattcgtccacggccttggcgagtttttccttgtccagcgtttccggcagttcgttcacaatgccgttgccgtcatgggggatgtccagcgtattcaggaaagtaatcagcatgtcctgatgcttgcgcagaagccagacctggagcaggtggtccccgatttcattgctgggtttccacgccagcattttctggatgaaggagaattgctcctgaaggggcttgcgctggatgaattccgggcgcagttttttcagagcgccgagttcacgcacggcggcgcggtaaatggcgcgttcctggttgcgcatccagtccagaatgttgctgatcgtttcttcgtccgcctgctggaaaatgtaatatgccttcatgataagtagggaaagaaaagctctttgaggacatgaactccaccatgtttccccctcctatgcaagctcttctactgtcacctgccgtacttggcttctattccggattcaaggcgtaaaaaaacggtcttattgcaaaaaagacttgctaaaagggggctcttatggttacttgcttccgcgcttctcgcgatgccactgtagctcaggggtagagcaacgcattcgtaatgcgtgggtcgtcggttcaattccgaccagtggctccatcttcagagttggagcttgtcgcggggaactgccggatacatgcctcgttagctcagttggtagagcagctgactcttaatcagtttgtccacggttcgagcccgtgacggggtaccatccggtcgttcctgcaaggaacgccgccattccagtgcctcgttagctcagttggtagagcagctgactcttaatcagtttgtccacggttcgagcccgtgacggggtaccatctctttttaagtccggcttgctgatggcaaagccggacttttgtttgatagggaacgttgaaaaaacgatttgttctttccgattctcatttgccctgccaagcctcttttcgggcggtgcaagcatgtacgataatatggacaggcagttatttaaaatcaggtgttgaaatctcttggaaattacatttagtgttttaataacggcaacataaaaaattccatgcgaatgccgttcttattgattatctccgtacatggggaaaggatcgttttcgttcacgcatgacatttcaagaaaatattgtttggaatacggttctttgaaaacatgtccattgtaataagtggagacggcaaacatgtccgtcaatacggtgccgtttttaatgaatcttccgggaagtccccattgcttggaatcgttcaaagaccgcagatatcccttatatccccggtaaatgacatgatcgttattataaatgattatgttgtccgtatctccaatatcattttttcctagaaattcccggatgttgtcggaatcaaaattcaaaaaatacggattttgattaaatgatacatcatcggaaaaaacaatatctccggattctgattttatttgaatatgggcacaattgttttttgtaaataaaatagttgccggaatgattaaaataaccaatgtaatcagaaaagatatttttaatagattctttttcacttaatatgatgatattttatgagtaattttcttccaatgttgtatatggtaaatttgctgtcagaaatttcattttatatttagttttaaaaatttacttggttggcagttgaggcatttttgatttataaatttccattacaaaaaatttaaataaattcctttatttatatagattcctactataattaataatgaaaaaaatttcatgcaagacattatgaaaatgatgctatatgcgcaactgtagattaatatgaaaatgatataatttattatagattcttttcttcgtgaatataatgacgtgatgatgctttctataatatttttaaaaaataaaataacagattgtttgaagaaccaaatgacaaaccatattaaccaccataaaaggatgtaataaatcaaatgtaaatcgaaagttctagcaagaccgtacccgaagtagacaagactccctataggaaaccagaacgtaaaaaaattattactggcagacatcaatatcttttttgttctatcatgcgcatattttttatttaaatacgaaataacatgtattttttttataaataatgaaatgagtattacagcaatccaaaatactatccaataaaaaattacttcaatataatgcaaggtgaacgtgtgggtaaatacataaaggataaaataaatccaccataatattgaatacaatagaagaaattcgctggaactgtttccggatgatttgcaattaatgcaatatttaagggaaaaaggtcccaaaatggcacttaaaatggcaaatgctgtttttttatgattaatgaactccattatttatttaaatttcttaaataattatataatccttcaattccacggagacctgtaatgttcaataacgaatccaatgcttgccattgaaatgcttttaacggaaagatttttggacacccctcaatagtgccttctaatgtgatagtgtatctagagtgatcatggcctaatgctcgatgtattgtagatatgggaccgccaactggatttttaaaatatggatatgctgattcaggtatggggatttgaacaaaatcatccggatggccatggcctcctactcttccgagggttttacgcgttataggtaacgcagggtcgcgattaacggcgtatgcaggtccccttaattttccggaacttataattaactctttcgattcttttgtggtaatatgttggagattaactttagcggtgtttttagcggcagctccacctggagacgaaatgagccgattggcatcataggatactgcttcttccggttcccgggcggtcttgcggttgccgatgttgtcgtaggaatagataaagcttcctccccggctgatccggtcttcgaccagcccgctgcggctgttgtgggtgaagtttctggtggttgcaggtgtggttccatcccaggagtcccgccgttggacaggacgcatcagcgcgtcgtagccgtattcgtggccggctgccaattcgccatccgctccctttctgtaactgatggcggttacgaggtcgagcctgggatgataggtattgcagcggaccatgccgttggggtaggtgagatagttgaggaagccgctgggttggtcatactgccaggtaaatggagactccagtccttccagattcatcccgatgatggcacctttggaatcgtagtcaagatgggagtgctgcacggtacgggttccaagaatcaggcgatatccgttggaacgacccaaggcatcgtattgttcctgggcgcagttttccacggttccaaaggaagtgtcctggatcatgtggccgtaggcatcgtaggagcattccctgatgccggaggcgtcccggacggaggtcatttgtccaatgcggttgtaggtaaactcccatccgggagtgttgtcgttgtgggagacggagaccatggagacgacctttccggtggctgccgagaagcgcagggtgcgcccattgctctgcaccatgtccaggtaggcgggagaggtgccggtgcagggagacttatcggcattcagcttctgaaccttgtagttcaacttgcacgaacttccggagacggaggctccggcatggccgtcagaactctggaaggagatggaactgcccgtgggtcgtttgacggagatctgtccggtttcaggattgcaggaggcggtccattcgaggggatgcttgtagcgcagggtgatgggacatggagaggaaggttcggcaagggtgcggagaagcgggggattgcctcctccacttcctccttcggaatcgccctcacccatttccagtaagccttcgcagtcgtcggccccgtccggatagccgccgaagaaatgggaggtgttcttgctgcaatcggactgttcgacgtcttcgtcacaatcacaggaacaagggcatggacaacccccttcctccggctccgctggaggaaaaggagagtgaactggaactgctgctcgacgagtccccttcttccgcctcctggtacaggttgaccagggtcaggacggtttctccctccttgccggcgggagtgttttccgccagcaggtaataatccaggtcgggctctccttccttgtcgcatatcagggcaatgcagaactcggcttccgacccctggccgggctggtgttgatggacgatgtggcaccagtagtatccctggtcaaactggatctggcggcggagggggggggaagagcccggctccgtggagagttccagttccttggcggggatggaaagggagatggaggagtgggcgtgaaggtggagaaaacaggtggcgggagccatgaccttgaggtatccgaaccattcgtgccgggtgggggaggaagcagcgcgtttggggataaggacgggagcggagaggccgttgaccaggaagttgccctggggctgtccgttggggtacatgggaatgaaggggtagacggtgtccatggcgccgatattgaaagtgttgttcatggcaatgaaggtagaattatgaaatggttgcggctactatgaatcaaaaactaacaacgtaaacacgccggagacgttaagaaaaagcgtcccgtacagaaatgtagtgagggaggtatccggggcaattcctgcttttgattgcgtggtccggtctggtagtgtacgaatacggcagtgaaggagcggagcgttcaggattgtttcatggcccggtgtttcgccccggagaagggaaaggggagccgtcccgaagcctggaggcggttgaaagaggctttggtgaacaatttgctggaacggcaggcagaccatgaattccgtcttccggaaggattctctttttccctgcgggaagaggatgctcaccgggctgttactccttccgtgctggagggattgctggaacgctccctgacggatggccgccgttccggaaccgtgtatactcccggcttcctggtccgctggatggcccgggaggcggtatcctcctggctggcatccagattgcctgctccccggaatggtaatgaggaagccgggttgctgagaaatatccgggtgctggatttatccgccggggcgggggcattcaccatgggaatgcttcgggagcttgccgcgcgcagaaagcgtctggagccggaatatgcggaggccgatttattccgtgccattctggaagagaatatttacggggtggatgtttgtgcggaggctctggaggtagcccgtttccgttttcactgtgcatggctagctgccggaggaaagggggatttccgggatcacctgctgtgcggggacagcctggacatgtctgcggatggcgtctggcggcagggcctttcagcggtgatggcggacggaggctttgacctggtaatcgggaatcccccttttgtcggggaaaaagggaacaaggagctgtttgaccgtctgaagtcttctccgttggcttcctattgttcttcccgcatggattactggtacgtgttcgcctgtgtgggtctggatgccctgaaacaggggggcgtgatgcatttggttgttcccaacaggtggatggcgaatgccggagcggctccccttcgccgcaagctgctggaagattgcggattgctgcgtttgtcggatttcggggcttgccgggtgtttgaagccgcacgggtacataccatgaccgttctggcggaaaggaagggggatgggggaggactcccggtgccggaataccgccgtttttgcggtcccatggaagaggtggaatcctttctggaacatgaaccgtactgccggttttctttgccggaagataccggggcatgcgtcaaggaaggattgtttttctgctccgcagccgaatggaacgttctggagaagatggagagatgccggaatttcaggctggatgccgcaaaggaaatgacgcaggggattgtaccgaaccccgatgtcgtttccgcccgtgcgctggagagcctggtgccggaggcagtgcagcggtccggcgtccggaggggggaaggggtgtttgtagtgccgcaggggtatttcaaccggctgccggcagcggaacggcgttttctcaagcctctgtatgaacccgtcctggcaggaagatacgcgttgaaagctccggagaaggtgttgctctacctgactccgtccaacgggtcggaacaggccgtcacgcttctccggcatctggaaaagttccgccccctgatggaagcccggcgggaaacccgcatgggccgcatgaagtactatcatgtgcactggccccggaaggaacggttcttccttcccggtcccaagattctggctgtccggaagtgtgctcggcccaccttctcctacacggaggatgaggcttatgtaatgatggcgttcaacgtgatacgcacggaacgcgtaagcatgaagtacctggccgccctgttcaattcacgtctcatgcagttctggtttctccgcagggggaagatgcagggggactttttccagatggatacggcacccatcctccgcgttcccatccgggtgcccggcctttccgtgctgcgggaggtggaagagctggcggataccctcacggcccgctattgcccggaaggggatgaacggatgaatgagctgatggaaggcgtttacggcctctcccggcaggaacgggaagtgcttattcaggcgtgctctccaccgcgggccgggtggggaagcatgccagaatgaggaggagcagccagtaggcggtagaaatgatacccaggaattgcgtcgcggttccccctggatactggaagcgctccaggatggcccagttaaggaaaataatgacgcccaggcccaggtaaccgtaaccccacgccgtgttgaagccggcgtcccgaagccttctgatagtgacgcccaggataggaagataaaggaccagcaagacgatttgggtaatgaagaagaaggaggctattcggataaaaaggatagcctgcatttgttccgggtcctgcatggccgccagttctccccacggaagagtgaccgcgacgatgactccgccgacaagactgaagatgaaggagaagaggttcatgaaaaggaaaaagccccagaactctcgccggggagccgttccggagaaggcgcagtactttttcgtcaggcacaggatgaagtatttccagagagagggtcgtgttgtagtgtccatagctgccgcttttcataacatggctttttgaaaaacagcaacgccaaaagaaacatccgggcttgattttcggagggccccccttaaggtgtgcgtcctgcaacctgtttgtcgagcctatgatgaagcctgtttttctggggaaatacctgcttgccgcctgctggtgcgccgcttttcccgcggcggaggccggcgcgggaacggcgcagcttcaccccgcttccggggattctctgccctccctgtgccgtgtgctggaccgcgggcccgttctgtaccgggatgattcctcatggatcaggagggtgaagctgaccctgatcggccagtaccagacggcagccgtcagccccaatggagccaacaagttctgcccttcttccggcggccataacagcgagtggcgccgcgcttatctgggcggcgacgttgtgatgggggacggctcctggcgcctgtccaacctgacgaacgtgggggatctggaaggccgccaccgcgaagtgcgcggagaatggaccggcagccgcacggagtggtccctgtatgagctttatctggaaaagaccatgcccggcatcaagttcagggccgggaagctgacgccgcacctgacgtcggaatactgcctggcttcctcccggattaaaacggtggagaggtccgccctgtgcaatgaattgattcccatctccaactgggggctggaggccaatttccagaaggacgccaggagcctgtaccattcctatggcgtttacctgaacgcgaatggtacggatttgaaggatgaaatccagtttcattccgcggataacctgtttgccctgaatgccatgaaatggaaggtggcttcccccatgtgggacagccagactctggggtaccagtacgcccataattttacggagtggcggggaaggaaggttccctcctcttccgattactgtggaacgggtgcgcaggacgtgctttccctgagctgggacgccagccgcggcgccttttccgtgatggggaacctgctggcgggcgtggggatcgtgggccagccgggcgccaagaacgtgtacggtctggttctccagcccgtttaccggatttccccccacttggaaggcgtctttcagtaccagtgttccttcggaaaccgctccgtgaagctgaatacgcggtatgtgcccagcgtcacccattaccccgcgtgggtggacagcatgcattccttttacctggggctgaactgctacctgtgcccggaagcggtcaacgcggtgaagctgatgctggcggtggaatatgtcaccagccgggtggactcaacaacggccaaggccttcaacggatggtctgttttcggggccgtccggttcaagttttgatcccctcctgccgctattgcagtttcctcagcacagtgggctggtaagcggggagcgccggaatgggaacgtatccgggggggagctggtcccacacgggatgcatgggctgggtgtccgcttcaaaaatggctccattgaaggatttaatgatggtgcggatggctccggacggcgccggctgaatcacaaaggggcgcggctccgattccggaaggttcatgtgcaggttgacttccgcttcgttccaggcgggccagacgtcggaaggcgtggagatttcacggatttccgtattggtggcagagcggggagtgtggaaaaaggggctgtcagggtctccatcgttcagccagacttcctcgtccggcgtctccgtcgtgatgatgagcccttcctggttgtccggatggtagaattcatagcctgaccgggcattgccgtccgtttccgtcctgtcgtcattcatgtggatgctgatggcaggcttgctccgggaagcggcctgccctagttgggactggaagagggccgcctgccgcttcagggcttccggagaagtgcctcgcgcgtatttggggaagaaaacgctcttggtgtctatttttccagggcgcactttcaccggttcatccgacagttcaaagatgtattttacaggaagttccgttgcggaaccccggtagcagaaacttcccagggacgccaggcccaggcacgtcaggagatacaggcgcggtacggatttcatcagaggttgaactggttccagtagaacaaaaatagggaaatattcaatgctaaaagagaaaatcccgcttccgcggcggcaggaggcatgttgtgcgtccccatgcggggacggctgcggcatttccgtcatttctcttcttggcagctccgtgcggctgtcctatggtaatgcgcatgatgaaaaaaattgccgtcttgtgcgtggccgcctctgcctccctcctgtggtgcgggtgtgaccgcaagcccgctgccggggaaaagcaggccgcccctgccgggaaacgggaagagcctgccgaagaaaagggggaggccgcagcctggcgggaacgcctggacgccgcctccgccaaagccgcccgtgagaaagggaatgacagggagcacgtgaagacgctcaatgacgtggccgccctgtatgcggagggattgcagaacggctgggcccatccgctggatgtgcgctcctggtgtgactccgtggcggaaacgggttccggatattccggggagacggttatcggcgccatgttcctgtacggaaccggcgtcaagcgtgatgccggagcggccagggagtggtttgaatacgggctggcgcgtccaggaacccagcgggggaatgccctgtacatgctgggcatgatgtatttcaagggggacggcgcggaccaggaccggaacaaggccctggagctgtggcgcaaggcggcggatgaagagcatccggcggccatgggcctgctgggccgggcctacatggaggggaagctgggctttgacaaggatcctgcttccgggcgcgtattgctggaaaaggccgccaacggggggaatacgccttcctccgtctatctggggaatatttatgcgaagggggagggcgtggagcaggacatggagcgcgcgatgaaatggtatgagcaggcggcctccgccggggacgcccgtgcccagtacatcgtggggctggcgtatctggaaggctccggcgtactcgtggatgaaggcaaggcgttcaactggctccggctggccgccgggcaggaccacgtcaacgccatgctgatgctttccgtctgctacagcaccggaaagggaaccccgcaggatgcggacatggcggaagtctggaaaaagaaggcgctccaactgaatgcggagcgggagggcagccgtgtcccgcagacggaggaacgctagtcttcccggatttcccggttcaggaattccagggcctgccgccgttccagaatgatgttgccccggtcgtccgggatgaccagcaggccgtcccggtgttccagaatggcgtgaagcatggcgaacacatggcccagcgcgcattcgtcctccaggatgaaacgcagcatcttggtgcgttcccctatttgccggagggcggagcggtcccttttgaaggcctggcgggcatcgtccgtttccatgacccagaacacgtcaagctgggattctccctcttcgtccaggtattccccttccagcacatggtccggcgcgttttccggcgcgccggaaaggttcagccggaagcaggcgtccaggcggaacatgttcttctgcaattcctccgccgccggcaggggggcgtcctgaatgaaaagccagaattcctgttcgtccggggcaggggcggcgtgcgtcatgggcggattgtggcattcccgcggcgttttcccacccggatttgtgacattgaggcggtgcgtgcggatttttggatgttcaagggctttcctcccgattaaaaacaggggcatgagtattcccgtaatgatgacggttgccggttccgactgctccgcaggggccggacttcaggcggatatgaaggcggcccatgccatgggggcgtttgcgctcacggccgtcacctgcgtcgtgtccgaggtgccgggactggtgcgcggcatccaggaggtggaccctgagctggtggcggaccaggtgcgcatcaatctggagcattttccggtaagcgccgtgaagacgggcatgctgtactccccggccatcgtccgtgcggtgcatgaggtgctggcaggtacgggtatccccgttgtggtggatcccgtcatgatcgctacggcaggagaccggctgatgagggaggaggctgtagccgtttatgaagaacttctgctgccgggcgcggccctgctgacccccaatctggatgaagccgccgtgctgctgcgctcttctgtcaaccctgaaagggatgaactgccggaggctgccgcgcgccttgccattaggtacgggtgccccgtcctgctgaagggcggccatctggaaggagactgccgggacgtgctggccggcccggacggccgcatgctgggggaatggaaccgcccgcgcgtgagggatgtgagcacgcatggaacgggctgttccctgtccgccgccatcgcggcgcggctggccgccggggacggactggccacggcggtggagcgcggcctggaattcattgccgccgccatccgggaccacctgcgctgggagcatccggtccgggtggatgcgctgaaattgtggtagggagccctttcgttccgccccgcctgccgccgttccctttttccggcccggttggaaaaagcggggactgccgccgtctttctgtgccttaataatgctttgtgcttgcgtatgggaggcggggttggtagttgtatccacgcccatgtgccacatggagctcttaagaattagtaaatatcatagcaattatcactatgggacagcaaatccgcaaagtcaccaagcgccgcagacgtgttgaatacatcaagcgtaagaaggaacagtccaagttgaattccaatacgcctatccgtctggccgttcccgttgccaaggacgccaagcctgccgccaaggaagctcccgccaaaaagaccgcggccaaggccccagccaagaagactgaaaccaaggctgccgccgccaagaaggctcccgccaaaaagccggctgccaagaaggccgccgaacccgccgctgaataattgcccgggcggaggttactgcctccgcgcgtcaatcaaacagtttttacaagccgtcgtgcaattgcatggcggctttttgcatggcatggccttcttatgtacaaaggaaccgtgggcggcctgatttttcctggggcgcccctgcggattccttcgctgtgagccatggcccgttcctgcccatgcttccgcggcatgggggcttctcccggacttttccggaatgatattgactctattccccggaggcgtacaaaaggaaataacaccattttgtttttccagccatgcgccaccgtaccaccgacaccgccaaaggacaccgcaattacatcatcattgcgtgtgacgtgcttcttttcctggccatgctcaagtggcttcccgtggagccggaggtagccagggggctggccgttctcaccttcatcggcattctgtggctgacggaagcactgcatgtgaccgtgaccgccctgctggtgccggtgctcgccatgttcatggggattcttccgggggcgaaggcattggccggctttgcggatcccaccattttcctgttcttcggcggctttgcgctggccggggcgctccacgaacagaaaattgatacctggctggctggaaaaatcctccggatggcccgcggaagcctggggatggccctgatcctgattttcctggctacggcgttcctctccatgtggatgtccaatacggccacggctgccatgatgctcccgctggtcatcggcctgctggaccgcattccggcggaaaagctcaagacgacggctccctttgccgtgctgggggtggcgtacagcgcctccatcggcggcatgggaacgctggtgggttcccctcccaacgccattgcggcgcatgagctcggcatgggatttgcggaatggttccggattgccatgcccattgtcctggtattcggagtgattgtcttctgcctgatgtacctgttcttccgcccgcggctggggctgcatgtggacatggccccggcggaaggggaggttgcggaggcccggctgaatgccaggcaggtgcgcgtgctgcttctcttcgtgctggtggccgggagctggatgtgcagcagcttcctttcctccgctctgggcggcattccgtccatggacacgctcattgcgctgtgtgccgcggttctgctgcccctgtgcggggtcatcaactggggcggcatcgccaaaaatacggactggggcgtcctgctgctgttcggcggcggcatcacgctcagcagcatcctcgtccagacgggggcggcgggatttctggcggaccaggtatcttccctggccatggggcagagtcccattatcatcctgctcatcatcagcctcttcatcacgtcgctgacggaattctgctccaatacggccagcgcagccctggtggctccgttgatggtgacggtggcctccgccatgggcatgtccgccacgccgctggtgcttctggtgggcatcggggcctcttgcgccttcatgcttcccgtctccacgcctcccaacgccctggccttcgccacagggaaattccctcagatgaccatggtgaaggtagggctgctgatcaatgtggtgctcgtcttcgtgaaggctttctgggcctggatattctggatgtagcggaaagggctcccgtgcaggcgcgggctttgccgttccgggcgtgcggcgtggcctacttggccggaacggctgttccctgggccttttcctggagttcccgcgccgctttcttgtccagtttggccagcttggcaatcaggtagaagaaggaggggatgaagaacaccccgatgaagacggccgtaatcatgccgccgatgactcccacgcccaccacctgccgcgctgccgctcccgctcccgtggctacggccaggggaaggcagcccatgatgaaggcaaagcaggtcatcaggatggggcgcaggcggattctggccgcgtccagcgtggccgtgagcaggtccgtgccctgcctcagttccagcacggcgaattccacgatgaggatggcattcttggccgccagcgcaatcagcacgatgaggccgatttccgaataaatgttcaggttcagcccgaacatccacagggccaggaatgcgcccaggatggcgatgggggcggtcatgaagacggccacgggcagggaccagctctcatacagggaggccaggatcaggaaaacgaacacggcggacgccgcaaagatcatgccgatggtgatgcctttctgcgcctgtttttcctggtagctcatgccggagtagtcataccccatgccggacggcatggtctgggcgaagacttcctccagggcattcatgacctgcccggaggaatagcccggagccggggtgacgttgagctgggagctgttgaacatgttctggcggatcaggaattccggcgcccagccgtgagtgacgttaatgacggaatccagcgggaccgggtcgccgtcattgttgcgcacgtaaaacatggaaagcttgtcgatgctgttccggtacggggcgtccgcctgcatgtacacctgccattcctgaccgtaaatgttgaaattgttcaggaaggtgctgcccatatacgcctggatggtggcgtaaatctcatccacgttcatgttctggagggtggcttgctccgtattcacgttcagattgtactgaaggttggagggagacatgaaattgctgatgcccgcgatttccggcctcttttccgcagcctcgatgaatttggacgtattggcggccaggaatttctccccgatgccctggcggtcctccagcaggaaggtgacgtctccggatgtgcccacgcccggcaggggcggcggcgggaccacgtacgccatgccggaggaaatctccgcgttcagcttgcttttcagccgggcggcgatgccgtccgccgtcatgcccggggcggtgcgttcggaccatggtttcagggaaatgaagaagaaggaattggaggagctctggacggagctgatgaggttgaacccgtttacggtggtgaccacttccacgccgggatcttcccggatgatctgttcaatccgcgcggcggtggccgccgtgacgttcagggaggtattgtccggcagttccacgccgccgaacaggtagccctggtcctcattgggaaggaagccagtgggaatgagcttggcgagagggaagaggagggcggtcatggcggccagcagcaggatggaaagccacatgtgccggatgagcttggcacaaatttccacgtaccagtcgcgcgccttgttgaagcccttgttgaataacttgaagaagggccccagcagggggatggaatccgctttccctcctttcagcagcccggcggacagggtgggactgagggacagggcgcagaaggcggaaatgatgatggacatgccgatagtcacggcgaactgctcgaacagcttgcccgtgacgccgggcagcagcagggtgggcacgaacacgcaggaaatcaccagggccgtgctcacgatggggccggatacctccttcatggctgcgatggtggcctggagcggcttttctccgttggaaatatggttcttcaccgcctccaccaccacgatggcgtcgtccaccaccaggccgatggccagcacaaggcccatcaggcagatggtattgatggaaaagccgaaaaacggaaaggcgatgaaggcgcccacgatggacaccggcacggcaaaagccggaatcagcgtgccgcgccagccctggaggaagatgaagaccaccagcacaaccaggcccagggcgatcaccagcgtgctgacgatgtcttcaatcccggcgcggacggccagcgtggagtccagggaaacgaggtaatccatgccggggggcatctccgtatcgttcagcagggccttgatattgtccaccagctggatggcgttccctccgggcgcttcgtaaatgccgatggaggcggcgggcatgccgttcacggaagagctgaggctgtaagtctccgaacccagctccacgcgggcgacgtcacccacccgcacgatggaactgccctgtccgcgcaccacgatgttttcaaactccttcacgctggtcaggcgtccgggcgccttcacggtgaaggaaagctgctggtccggcggagcgggctgcgcgcctatcttgcccgccgggttcacggcgttctgggcctgcaccgccagcatcacgtcacgggccgtgatgttcagggcggccatcttttccggattcagccagatgcgcatggcatagcggccggagccgaacacctgcacgtcgcccacgccgggcacgcgcttgatggcgtccaccatgttgatatacgcgtaattggccagccagaggccgtcgtaggttccctggggggaataaaggctgacgaccagggcgggcagcccgctggtcttgcgcagggagacgcccagttcgctgacttccggcggaagctgggaggtggcctgcccgtagcgcaggtaggaaagcacctggtccatgttcgcctccgtgccgatctcaaagaggatcatcatgctcatctgcccgttgttggtattgacggaagtcatgtaggacatgccgtccacgccggacatctgctgctcaatgggggatgcgatggatttgaccaccgtctcgcagtccgctccgggataggtggccgtcacctggatggaaggggggatgatgtccggatactcggaaatgggcaggcgcagaatggagaaggtccccagcaggacgatgatgatggagaggcagatggagaggatggggcgcttgatgaagaaatcggccatggcgggaggggcttattggttgctggcgggtaccgctttcaggcgtgcgtccgggtttctggaggccatttccgcctggagaaggccgtccacgaccactttgctctgcggggtgagggaacccggtttcagcggaatgacctgctgccggtcgccgagctgcgttccggcctgcacggggatgatggaagggtggttgttctcatccagcgcaatgacgaaaaagcgcccctgcgtggaaagaagagcctttgccggaacggtcagcgcgtttttgacggtagccagccgggccgtagccatgatgaacatgccggggcgcagcaggtaatcggcattggggaggttggcctgcacgcggatggtgcccgtctgggggttgaacgcccggtcaatggctaccaccgtagcctgttccgggtatttggtaccgtctttcagcgtgatatccagcttgctgcccgtctggacgccttcattcccgttcttgccggcctgctggatccattcctgctgggtgacggcaaagttgacgcggatgggattgacggaggatacgacggcgagggggccgctttccgggctgaccaggtcgcctatattcgtcttggaaatgccggcgattccgtcaaagggggcatacagcaccgtataggaaagattcttttcagccagggccagggccgccgtggcctgctgcacctgcgcttccgcggcaatggcggagaggcgcgtatcctcgtacttctgcttggaaatggcgttctccgcggccaggggcttgtaaatctccgcgtcataattcaactgctggagctgggcctgcgcctgttccagcgtggctttggccctggagacctggtccttgaaggtggaatcgtcaatgcggaaaagcacctccccctttttcacaatggcgccgttggcgtaattctgcgtttgcaggtagcccgtgatttggggaacgatggaggcgttgtccacgccatccagatggcccacccagcttcccgttaccgggatgtccatggcaacaggctgttcgtaaataagcgtgggcgtttcatgcggcacctgttccgtctttttacacccggaaaaaaggagggagaacaagaagaggagaacggcggaaccggagatagagcccgtcaggcgtgtcaagtccatgctgtgaatgacacgccggcggcctcctttgttgaaagaaggctttccgggcggcagcgccgtccgtgtcatgcaggtggattttcacccggatgacgcggcgggacgtcttacgggcgggcggaggatttgtccggcgtgaaggcgcgcaccagctctccgatccacaggacgagggaggtgccggcaaagatgatgccccagtccgtccagctcaggggcaccacgttgaacatcttgccgccgaaggtgacgatgaggtattgcccggccaggatgagcagagccaccactccgaagcccccgatgctggcgcccatgcgggcaaaggcgctctggtgcgtgttgaaagccttggcgttgaacatgttccagaactggagaaggacgaagatggtgaaaaacagggacagttcatagccggtcagttcatgctccggtgaggagaagtccaggtagctgccgaagtagccgctgaggctgaactgcgtgaggctggtgacgtccgcatgcttgaagtattgcagcaggccgaacaggaaggccacgaacaggatgcccacgcccagaatgttcctgcccatggggcgggtgatgatgtggtccgtcgtcttgcgcggcggatcctgcatcacgcgttcgtccggcggcagggaggccagggccagcgcggcgaaggtatccatgatgaggttgacccagagcatctgcgtgaccgtgaggggggattccgtgcccaggaacgcgccgatgagcacaatgaggcaggccgccacgttgatggtcatctggaagacgatgaagcgctggatattccggtacagggagcgtccccacatgacggcgcgggaaatgctcatgaaggaattgtccaggatggtgatggcgctggcctccttggctacggtagtgccgtcccccatggagaggcccacctgcgcggcgttcagggcgggggcgtcgttggtgccgtccccggtgacggccaccacctggtccttcttctggagcagcttcaccaggcgttccttgtccatgggcctggcgcggcacatgattttcaggtccatcacgcggtccagcagttccgcatccggcgtctgttcaaactccacgcccgtcatcaggcggtccggcgtgtccgcctccgtccacaggccgatctggcggccgatttcccgtgcggtgccgggggtgtcccccgtgacgatcttgatattgatgcccgcgtccatgcagtccttcacagcctggggcacgtcgtcccggacggggtcggaaatggcggcgatgcccaggtaaaccaagtccttgcggatgacgcggccgtcctcaaacaccggggcgtcatcatccaggattcggtacgcgaagcccagcgtgcgcatggcctggttctggtaggccaggagctgttcctcaatggcggggcgcatgtccgcggcaggaacctggccttccggagtcaggacggtggagcagaggcccagcacgatttccggcgcgcccttcacgtaaaggacttttttgcccagcaggggggattccaccacggtagccatgtacttacgttccgtggaaaaagtgagctgttcctgcacgcgggcgttttcccgcaggtccaggtaattcacgcccagcccgtgcagccacaggaggagcgccccttccgtgggattgcccagggccttgatgtgttccgggtccgcatagtccaggaaggcggtggagttgacggcgatgccttcccggatcaggttgcccagctcgccgtccgccggggcggcgtcccccaggccgtagaagtccgccttgtatacgttcatctggttgcgcgtcagggtgcccgtcttgtccgtgcagatgacggtggcggcccccatggtttcgcaggcgtgcatcttgcgcaccaggttgttgttggcgagcatgctcttcatgctcagggccaggctcagggtgacgctcatgggcagcccttccggcaccgtaaccacgatgacggtcacggcgatcatgacggtgttcagaatgtaggttcccgcgctcagccattccacggggccgggcaggtgggagaaatacagggtaagccgcccgatgatgataagggcggcaatggcgtagctggcccaggtgatgaggtcgcccagcctggaaagctggcggttgaggggcgtctgcaccttgttgtcgatctgggagccttcatagaccttgccgtattccgtcctgtcccctacggacgtcacttccatgatgccgtggccgtccgccacggtggttcctttcagaacgtggttggaggggtaggtggcgtccttcttgaattccgcctcattcgtggttttgccgatgaggggttcccccgtcagcgtggattcgttgacctggagggaaacggcttccagcaggacgccgtccgccggaacctcctccccagtgttcaggatgacgatgtctcccaccaccacgtcccggcggggaagttcgcagatattgccgccgcggatcacctggaccatggtctcgtcgttgacctggttcaggatttcaaacttcttgttggcgcttacctcgaaggcgaagcccacgcaggtggccagcaggatggctaccaggatgcccacgggctccaggaagacgctggccggttccgctccggtgaagaactggtagcaggccacgcctacggacaggagcagggccaccagcagaatcttgatgatggggtctgagaatttctccaggaactgcttccacaggggttcctttaccgggggcgtcaggatattgaccccgtatttggtccggttttccagaacctgctgttccgaaagtccctggtgatgtgctgcactcttcatggttgagatgtttctttacctgattggagtccgtgagaaaagtgcggaggaggattttcagggatgatgacgggagtttttgggaaaggagcggcgcggcttgcctcccgtgccgtaaaaggcggcattgttgccttgactttgacggagttccggcgattctgaagcacctatgtggaatgatctttctcatggcctttccgtactggcggacgcccttgccttcctctcccgctcctgggggttctggatctgcgtgggcagcgtggcgggactggccgccgtgtatgcgtggtggagaaagcggctggccctgtgggcgtttgccctggcgttcctttccctgctggccgtggtgggcctggcgtgccgccaggtgatgcatcaaaagaccttcctgtggatccaggagccggagctccaggccctgtccggaaagtacgaggtggaatcctcccccagggagcggtggtttttccggccgccggagctgaagcgctttttccaggtcagctcctccacgcttctcctgaatgaagacggaacgtgcgagatttcctccttcccgcgcccggaggcgtggggcaggtggatttcccgcccggaagacagggatgacctttccgtgctggaggaggacctcgtttcctcctgccgcggaacctggtccctggtgaagaaagggggatattacggcgtctccatcgtttattcccccggcagcagtttgacgctgtacctgggcggggagaatgcggaatgcctggtgatgccggtcaacccctccgacccgctggaagcggtgacgtttgagaaaacgttctgacccgggcgcaggggcgggtggaaaaaatggagggaggctgcttttccagcctcccccccaatgtagcttttcaagtgccgcttctgcttgagcgggagcgtggctccgggactccggaagcttttatttgacctttcctccttcgtacaccagcacttcaaagggcttcagcgtgaaggtgagctccttgtcaatgtttacggtcttgccggagaagccgtccagcttccgctggtcgtcataggaatccttgaaggtgatggaccccttgacgtccgcgggaatgtccaggatgccgcgcagggtgccggtcaggctcttttcctggtcggaggaattgcggagggccagggtggccttgtttttattccatgcggcccagccgtacacggccccttcattggcctccttgttccacgggttgccgcccacccagtgcacgtcgtccagaacgtccgcgttgcggcgtatccatttaatgcccttggccagctcgtcccacagcatgccgtccttggcgttcatcaggtccctgtccacgtaaagctcctgcagggaggtgccgcaggccgtggcgcagcggagttccttcttcacgttttcagggtcgcggggcatgcacgcgggcggcccgaacttggtgaccatcaggccgtgggtcatcatggaattgatgggcatcagcggggaaccctgcacaaagacctcatgcaccaggcggtcgcggtaggtgatccacttgtcgcggttgtcgcccacgccgatcgttccgaagtcgttttcctgcctccatacggaatccgcataacggaaccagaacggggaggcccaggtgcccacggtgcaattgatgtaaaggtcccccttcttcttgcgcagggcgttcagcacgcggatgatgccttccgcatcctcctcgttgccggggcccttggcgtggaaatgggtgctgatgccgtcgaatttgaagtacttcatgttgtagtccttcaccatctgggagcagcggcccacaaaggcgtcaaagtattccttgttggaaagctggaagttgccgatcttgttgtccgggtgcttcacgttccagtgggccaggcgcttgcccttggaggcaccgtagccgcccaccgggcccagccaggtgccgatgccggccttttgtttacccgcggcggcgtcaatgcgcttgaagccctgcgggaacatcttgtggaaatcccacaggctgttgaactcgtcccagccgtcgtcccagacgaaggcgtcaatggacatgccgcgcttctggaaaaactgttcctgccaatccttcaggacggccaggcactgttcttccgtcatgcgcttggcggggtctgaatcattgttccggttgatgttcagttcataccaggaattgtaatggatgaagggacggtagggcatcacgcgctcccgctccatataggccaggaaggaacggcgttgctggccgggggcgaagatgccgaggacggaggacacctcccacacctccctgggttgcatggtggttttgcggctccagacgccctgggcgagctgggaatcgtccgcctgggcgtcttccttttcctccagcgtgcgcacgggcagggagaaagtgatttcccccttgctggcaatcggttcgctcttggtctggacccagtagcgcagcaggtaattccccttggcgggaacttttacggtgtaggaattgttggcattggcgtctccggtactcccggcgtggaagtcggaatcaaggacggcccccttggcggaaaggagctgcacgccggcggtgttcagcttgttgtttcccttgtcgcctcccttgtactggaaagtaatggtgcaggagcccttgccgtcaatggtgacggggccttccgcgcaggctacctgttccccgtactgctttttcagctcctgcggaatgttgaaattgcccgtccatgaagccgtggaccatttgtccgcgttccaggctgtggactccccgcctgccgcgtttccggagcctcccacggtgttgatgcccatgggcgtttccagggcggtgaacgccaggtcattcacgatgagcgcgcccctggcgttgccggaaacggagggggagcccgccttcccttccaccaggtcatactgcatggccacgatgctcttcatctggatgggctttgtgctcaccaggcggagttcctgccgcaggtagtgggaattgtccctgagtacggcgcgccaggaaatgtgcagggagccgttcagcgcctggaaggaggccgtgacggcttttccggggaagcggtccgccagtttgaacgccttggggttgggctggagggtgacgagtttgacgtcccccgccttcaggccggaggacttgatgctctggccgtcctgaagattgatgatgaacaattcgtccccggccttggctacagggcccagtttggacgtcattcctccgaaggaaagcttcccgccccggttgatgaatttggccgtcaggatgttgttggaaagggtatagccggaaggagcctgctccgcattggccgcgccgggggtggggcccgggaagacgactgctgcgggaacggtggcaacgcttcccagaacggcggccatcaggagagctttagtgaggaatttcatggtttggtatcaaggaaaatggaactaccttgccaagatagaccccaacgcggtttcttcaaggaaaaagcctcccggcaggcgaggcggctgtttgaaaatccgtcatggttttccgtgcggaaagaactcccggtatctatgacacacaagcattgatttttttcaaccggtcttggtctaatctgcatgtatacggtagctgatcagcttgttgaaatcttggaaaaagcgggaataaagcgcatttacggcattgtgggagacagtttgaaccccattacggacgccctccgcagaaaaaaaaccatcgaatggatccacatgaggcatgaggaggtgggcgcctttgccgccagtgcggaagcccagctgaccggtaacctggccgtgtgctgcggcagcagcggccccggcaatcttcacttgatcaatggcctttatgatgcccaccggagcagggcccgcgtgctggcgatcgcctcccacatcccccagagccaggtgggggtggactatttccaggtgacccatccggaacaactgttcaaggaatgcagctcttatgcggaactggcttccacggcggagcaggctccccgcgtgctgatgtccgccatccagcatgcctattccctgcatgacgtgggcgtcatcgtgctgccgggcgacgtggcggacgcgccggcggaggccaaagacctggtgcatccacccgcctttgcccgggaaacagtggttccggaccatgaatccgtggcacgcctggcccagatgctcgcttcacacgaccgcattactttcttctgcgggggcggctgcgccggagcggaacgcaaggtggtgcagctcgccgcccgcgtgaaggccccgatcgcctacacctggcgcggcaaggactattttgagcatgacaaccccgtgggcgtaggcatgaccggactgctgggctggggtgacgcgtacaaggccatgcatgagagcgacctgatcgtgatgtgggggacggatttcccctatttcaacttccttcctaccaagcccgccatcgtccagatcgaccgtcgcggggaagtgctgggccgccgctgccgcctggacttgggaatctgcggggacgtgggcgccacggtggacgccctgctgggaatggtggaggagaaaaaggattccgaccacctggacgcctccctgaagcgtcacgccaaggatgtgaaggacatgaatgcctacatggacgggaacgacaaggaatcgcccatccgccccgaacaggtgaccaccgccgtgaacaagtacgcggctccggacgccgtgtttaccgtggacacgggcaccccctgcatctggagcgcgcgtttcctgtgctccacgctgggcagaaaaacgctggcttccttcaatcacggctccatggcgaatgccatgccgatggcgatcggggcccagaaggcgtacccgaaccgccaggtagtcgccctgtgcggagacggcggcctgtccatgctgctgggggacctcattaccatagcgcagtacaagctgccggtgaagctggtggtgtacaataacgactgcctggacttcatccagttggaaatgcaggccgcgggcctgattccgtggggcatcaacctggacaacccctcctttgccgccgtggcggacgccgtgggcatcaagggctttgtgctggacaagtcaagccaggtggacgaaatggtgcaggccttcctgaaatatccgggagcggctctgctggatgcccgtgtggaccgggatgccatcgcgctgcccccctacatcagcctggggcaggccgcggacttctccctggcgatggtcaagcagacgctgaccggggaagtgaagcaggtgtggaacaccctggccgggaaccgaaagctgttcaagccctgagggcttgaacaaaaatactaaataggaaagaccaaatactaaagctcgtgccggaaaatatttggtctttcatctttagtatttggtcactgttctgaaagagcctttttcagcgcttccgtcacgatcttcgggttggctttgcctttggcggctttcatcacctggccggtgagccagttcaggagcttgtcgttgccgccccggatttccgccaccttgtccggattggcggaaatgacctcctgcacgatggcgtccaggaaggaggaatccgccttttcaaagcccagcagcttggcggcctgcgccgcggtgagggacggttcctcccacatcctggtgaaaacgtccttggcctggttgttggaaacggtgccgtcgtcaataatggcgatcaggtcccggatggcgccgggcttcaccgggcattcggacgggcgcatgcctttttcattcagcacggcggaaatgttgttgatgacccagttggcgatcttcttgccgctggcggttccctgcgccgcctcttcaaagaagcgggccagttccaggtctcccaccagcacgttggcgtcatattcgctcaggccgtactcctccatgaaccttttctggcgttcctggggcagttccggaatctggctgcgcaccctctccaccagcggggcggtgtgtatgggcaccaggtccgggcaggggaaatagcggtaatcgtgcgcgtcttccttggtgcgcatgatggagctttccccgcgttcgtcgtcccagcggcgggtggactggatctgtgcgatgcccatgtccagttcttccgcctgtcgctggatttcataatgaagggcgcggcgtacggcggacatggaattgagattcttcatctccacctttgcccccagttccttctggccgtggggacgcagggaaatgttcacgtcgcagcgcatctggcccttctccatgtccgcgtcggaaatgtccccgtaattcagaatctgctggagggacttgaggtaggcgtaggcttcctccggggtatcgatgtccgggtcggagacgatctccatcagggcggaccccgcgcggttgtagtcaatcagggaataattggcgtggtgggtgatcttcgccgcgtcttcctccaaatggatgcgggtcagcttcacggtgcggaaggggggcacgccggccttgatcacgtcgttcgggtaggaccagggatacaggggcacctccccgcccaggcacagcggcaggtccagctgggaagtctggtaattcttcgccatgtccgggtagaagtaattcttgcggtcccactgggaaacctccgggctggagcatcccagcatcagcccggtcagcagggtgcgttcaatggcgaactcattcaggacgggcagggcgcccggcagccccaggcaggtggggcacacgcgcgtattgggttcaaagccaaagccggtctcgcaggagcagaacattttgctcttcgtcttgatctggcagtggacttccaggccaatggtcacgatgtaatctgaaattgccataaattcggaacgcttgaatatcgcgcaaactgtacggaaccctcttctccctgtccagtaaaaaggcctgaggcgggagagtggagagtggagagtggagagtggagagtggagagtggagagtggagagtggagagtggagagtggagagtggagagtggagagtggagagtggagagtggagttttagattaagaattattttttgatttggagggagacggtttttgtggtggaggtgaggaggcgtttgagttcttctccatcccggtaaatgctggcgtgcatttcttccgtcaggaaagaggtgtctttaagcaaatccagccaatagagggtttccgagcattccttcaaggcaatgtaaattttggaaaggaaatcctttttgctgatggcgcattccgcttccgccaggttggctccaatgccggtaccgcttctcagcagttgttttgaaagcacgaactcctttctctcattacacaaaaactggtacaaacgaacgatccgaacagcaaatttcctgctttttactctagtaattccctccatcactaaactctccactctgaactctcaacccttcataaaatgcccaactctttaagctgctggagggggcgttccggccagagcttgttggcgatggggctggcggggctggggtggagcagggtgccgatggtgaagcttttgccggggagccgttcggcggcgtcccgcagcttctgcgtggcgtaggctcccacccctaccagcgtatgcgggttcaggatggtgattagggaaaccaggtgctccatgcatactgcatccacggcggcgcgctgttccgccggtaatttgtccggcgtgatgttggctcccgttgcccccatccagatcagcgggcagtagttggccacgtaattgtgacggaagaagtttttcgcggtgccgaaggcttccgcaaagagcccccacaggcggcgcccgctgacttccgaccgagggcagccgaagccctccacgggacgcttgggatgggtgtgctccggcctgccgacttctccgcggatgtgcagccagttgacgaccgcatccacttccccgaaggggacgcccgtctgggccatgccgaaggggccgggattcatgcccaggaagaagtggctcttttccccgttcccgtaggcgcgcacgtactgctcatgcggcgcccaggcgtaggtgagcgggttgtaggtaaagtggaccgggtctccgaactggagccgctccgtaccgtcccggagggcggccgtggccttcagaatggctgctgcggtgtcgttcatgccgctgcatcatgaagcgttgccgtttattgcgccagcaaaaactccgcgcttgcattatttgcccggcccggtaacatttccccccggacaagttaaccttattacttatgagtggaatagccattatgacatcaggcggtgacgccgccggaatgaatccggcgatcagggcggctgtggatcatgcccgccagcttggaatgaacccgtacgttgtctatgacggcttggaaggactgatcgatggaaaaatcaaggaagccaccagggaactgaccagcgacatgatttacaggggcggcactctcctccgctcctcccggtccaagcgctttttcgattatgaattccgcaagcaggcctacgaacacctgaaggaccgcaacatcgacaagctcgttatcatgggcggcgacggttccttccgcgcgctgaacgacttttttaacgattttgaagtacccttcgccggcattccggccacgattgacaacgacatcgccggcacggattactgcctgggcgtggacactgcccagaacgtgattctggactgcatcgactccgtccgcgacacggcccgctcccaccaccgcgccttcgtgattgagacgatgggccgggactgcggctacctggcgatgaccaccgccctttgcagcgcggcggacatctgcatcgtccctgaaatcccttacgacctggaatccatttacaagcgcctccagcccgtcatcaatgaggaaggaagctgcatcatcgccgtggtggcggaaggcacccgcgtggcgcagtacctgacccgctggctgacggaacgcgccggcatggacacccgcctgaccgtgctgggccatgtgcagcgcggcggctctcccaccgcccgcgaccgcctgatgggcacccgctttgccacccgcgccgtggaagccctgaacaacggggacatcaaccagatcatggtgtaccatgacggccagtacggctatgcctccctggacgccgtggccgggcagcagtattccgtgaatccggacatcatcaacctctgccgggaactgagctgctagccggttccgcggttcctgcccccgcttttccgcgcccatgcctccatgttcccggcggcatgggcggatttgttttgaaaaaccctgccgctgctgtatgatggcgccgcatctttccctgaaaacagtgttatgaaagttatcgttacgggcggcgccggattcatcggctccaatctggtcaggctgctgcttgagcgcggccatgaagtcctgaatattgacgccctgacttatgccggcaacgtccgttccctggacggcacggcggattctccggcgtaccgcttcctgcacgccgacgttcgggacgccgccctgatgcggaacaccctgcgggaatacggaccggattgggtgatgcacctggcggcggagtcccacgtggaccgttccattgacgatccgggggatttcatgaccaccaatgtcatgggcaccttttccatgctccaggccgccctggaatattaccgttccttggagggggagaagaaggagcgtttccgcttccaccatatttccacggacgaagtatacggctccctggggaaggacggcctgtttacggaatccacgccgtaccgcccccattccccctattccgccagcaaggcgtccagcgaccatctggtgcgcgcctggcatgatacgtacgggctgcccgtgctaattaccaactgttccaacaactacggcccttaccagttcccggaaaaactgatccccgtggtcgtcctgaaggccctgggcggcgagcccattcccgtgtacggcaagggggaaaacgtgcgggactggctgtacgtggaggaccactgcgaagccctgctgacggtcgtttcctccggaaaacccggcgaaacgtacaacatcggcggcaataacgagaaaacgaatctggagctggtggagctgctgtgctcccatctggatgaattgcggccccgcgcggacggccggagctaccgggagcagatcacctttgtgcaggacaggcccggccacgacctgcgctatgcgattgatgcgtccaaaatacggagggagctgggctggtctccgcgccaggaccattcctccgggttcaggaaaaccattcagtggtatctggaccatgaagactggtggcggggaatcctgtccggggaataccgtctggaacgtctgggaaccaatggctaggaaattgatatgaaaggtattgttctggccgggggaagcggcacgcgcctgcatcccgtcacgctttccgtcagcaagcaattgctgcccgtttacgacaagccgatggtgtattaccccatttccgtgctgatgctggccgggatacgggaaatcctcgtcatttccactccgcgggacctgcctctgtaccaggatctgctgggggacggaagcaggttcggcgtaacttttgaataccgggagcagcccaggccggagggactggctcaggccttcatcatcggggaggaattcatcggaaaagataccgtggccctggtgctgggggacaatattttttacggtcgcggcctgacggagaagttgaggcgcgccgctgaactgacgagcggggcgaccattttcggttaccaggtgcacgatccgcagcgtttcggcgtggtggagttcaatgaagaaggaaaggccgttttcattgaggaaaaaccgctcaagcccaagtcggacatcgccgtgacgggcctttatttttacgacaaccaggtggtggagatcgccaagaggattcccaaatccgcccggggagagctggaaatcacctccgtgaaccaggagtacctgaaacagggccttctgcgcgtggaaaagctggcgcgcggctatacgtggctggacacgggcacgcacgacacccttctggaggcttccatgtttgtccgcaccctggaacaccaccagggcttcaaggtggcgtgcctggaggagattgccttcaacaacggctggatttccgcagaaacgctgcgtattcaggccggagccatgaaaaataacggctacggctgttatttggacgaattggtgaagtaacgttccgagcggcgctcctgtttcccctgcctgggaaaatggcccgggttgcgttggctccctgccgtagcccgggattcccggagggcgtgggtgcctcccttgcagtgcctgcccgtagggacggccgtgttcccggacggataaatgatgccgccggttttttattcaaagccgtaaaaggcttcggcgctccgggagccgcacccgggctgtaagaagggccgcggcgcggagcgcgcgcattcatttcgcaggatgaggcaggaactctttcggaaagcctgtaggaatggagagaggggcctacgggcggctgtccggcatggaaggattcatcaattccggcatggaggctatggacatggcgtttttaaaaaggcgccgcaccagaataacggaaagggccgctagcaggatttcgaggccgcaggacaggataatggctagccacgcagctggcgttgccagggagggagccacggaggacaggcactgccgcaacagggtggagaggaagaacaggacgctttgcagtccgcagcctgccgccgcaatgccccaggccaggaatgtccttctgcctgcggatccgtatcccgccgtataagggaaagaaaagaaagaaatgatggccgccagaaggaggaaggactcccaaaccttgtccatttccgcgtattgcaataagacgggcatccccgcaaacggaatgaggagggagtacagggcgggcaggaaggccagcgcgcttagaattcttgtgatcctgctcccctgggaagccagcaggaccctgcttccccaggataggaggaaagacagggccaggatggagattagttccgaccatgttcccaaaagcaggaagggcgcggctgtccgtgggcagtggaggaaaaggggcatgaaaagatgaatgaggacggtcgccgtgacgcctgctccgaagaggaaggtgcaggctctgataaatgccttggctgcggggtaaatcatccagttcatgggagaggagcgggaagtggagaaggacgggaaaaaggaaaaggaccgctccctgcgcgggagcggtcctgtagggttaacgtgaagtcatggacgccaatgcaatgacggcagacatgggttacttgtactgggcccagtcgacattcttcatgtctccgctcctggccagctcggcatgcatgcccagggcggcccggatggactgcggagtctgggccttgccgccggacagtttcaggtaatcccagaggatgttcttgtaatccggatggacgcagttctcgataatggtctgggcccgttctttcgggctcttgccgcgaagatcggcgacgccctgttcggtaatgatgatattgacgtcatgttccgtatggtcgtggtgggagaccatggggacgatggcgctgatcttgccgtccttggcgacggacgggcaggtgaagatggaaatataggcgttgcgcgtgaagtcgccggaaccgccgatgccgttcatcatcttcgtgccgccgatgtgcgtggagttgacgttcccgtaaaggtcggcttcaatggcggtgttgatggagatgacgccgaggcggcggatcacttccgggctgttggatatttccgagggacggagcaccagcttgtcgcggaagaagtccatatccctgtaaatgccttccaggcagtcgttcgtaacggtcagggaacaggcgctcccgaatttcacgcggccctcccggatcagaccgatcacggagttctgaatgacttccgtgtacatttcaaaggcgggaatggtcttgtcgcggcccagggcgcccagcacggcgtttgcaatgttgcccacgccggattgaagcggcaggaaggtggaggggataatgccccgcttcatgtcggcggccaggaagtccgccacgttctgcccgattttatcggtcagggggtcagccgcggcaaaggaacgggcttcgtccggccagttggtttccacgatgcccacgatctttttcggatcaacctggatgtatggtttcccgatacggtcgctgggtttgtaaatggggatttcacggcggttgggaggatctaggggttcgtaaacgtcatgcagccccatggcatttttgctgtgggcggcgttcaattccacgatgatcttgtcggcaaggcggcaaatggtgggagcgatccctccggcggccgtcagataaattttaccgtcggccgtgacctcgcaggcttcgatgatggccatgtctactttgcccatgaacccgtaacggatttcctgggccatctgggacaggtggatgtcgttgtaggcgatttccccattgttcaccgccttgcggaagtcaacgttggtggtgtagggggcgcggtagcgaatagccttggcgcgggaaagaaccccgtcgcaggaatcgcccgtggaagcaccggtgaagacgctcacctggaaggggttccccttagcgtgttccgcttctgcaatttttgccaattcagccgtcacagccttggccgtccctgcgggagtaaacccgctcaggccaatgtggtggccgtgtttaatcaggcttgctgcttcttctggtgttagttccttgtaactcatgtcagtgatttttgttggatgaaagagaaagaaactccgtgtcaacggagcggtcaggcttgttcttcaacaagcctgttgatcagatgtgccggaacggtccggagggaaccggtcggaagggataccacaggattgccctgatcgtcaatccccgtaaagattccccggatggtttcgtcatccgtaaggatggaaaccggcctttccccggcccatgcttgcgccagcccctcctgaagggtggggatgccgccgtgggcaaaggtagaaaaaacctggtccaaatgcctgccgagggaagccatgacgtcatgcagtgagggacagtcctgaacaagatccgcgagccttgcgggagggtccttgatttctccggctatagaggccacgtcattgaaaatgttgatgcctatgccgatgacggccatgtgcgcggaggggcgctccacaagaatgcccgccagtttggattttcctatgaggacgtcgttgggccagcgcaggcgcgcgttggcaatgcccatgctgcggagcatgttgagcagggccagccctgcaaccaggggcagatggccccagtgtacgccggccgcagtatccaggggaacggtgaaggaggaccacaggccgccttcctcccctacccatttgcggttgaacctgccgcggccgcttttctgcacgcggcagacggcaatgtggcgggggggcagggaacgggccaggtcattggtggaagaagcctcggcccattcatgataggtccagtcgccgcatggtccttcctcctctggaggagtgggggatggggcggtggaattcatgggatgggccgaggcctggaataatttcaaatcaggttatctcgccagagtggcaatgtagtagcctgcgatgactgcggtgccgatcacgcccgcaacgttcggtcccatggcgtgcatgagaagatagttggagggatcatacttctggcccacattgtgggagacgcgggccgccatcggaacggcggagacgcctgcggaaccgatcagggggttgaccggattcttgcgccagatgaggttcatcagcttggcggcgatcacgccgcccgcggtggctacgccgaaggcgacaatgcccagcagaatgatcagcagcgtttccttctgcaggaagcggtcaccctgcatcgtgaggcccacggaggtgcccaggaagatggtgacgatgttgatgatttcattctgggaggcctgcaccaggcgttccgttaccttgcactcgcgcaggaagttgcccagcatcagcatgccgatcagcggagaggcgtccggaatcagcaggatggtgacaatggttaccagcacggcgaagaacagtttttcactcttgctgaccgttcgcagggatttcatgcggatgacccgctccttcttcgtggtcagcagagccatgatgggcggctgtatcagcgggaccagggccatgtacgtatacgcggccacggctacggcgcccagcaggtgcggagccagcttcatcgtcaggaagatggaggtggggccgtcagcgccgccgatgatgccgatggaggcggattcattgggcgtgaagcccatgaacagggccatgaagaacgtggcggccacgcccacctgggccgctgcacccagaagaagggtgcgcggtgcggcgagcagcgggccgaagtccgtcagggctcccacgcccaggaagatgatgggcgggaagatttcagccttgatgcccagcccgatccagtcgtacagacccccatggatggaggtgaccagtaattcctgggtgtgctggcccacggccacgtacttgcctgcggcggagaccaccaggggttccagcttctgcgtttccagattcaccggaacctggttaccttccgtgtcaaagtagttgactcccttctggcgcagaacggtggtgactccaccgttcgtgagcaggtacaccggatcgttggcgtccgcttccgtcacgttgtggaagtccttcaggttggggtccaccgtcaggctgtcgtcccccagaagggcggcgtcagccttggctttttcctgggattcccgcacgggcttgatctgggagacggtcagcgggctgccggggtaaacctgcatgggctgttccatgtttgccagatactgggcgcgcgcttcaggcgtggtcaggttggccggcaccttgacgggggcctgctggagcggggccacgtgaacgcgcaggtagcccacgttgttgagggacgtggcggtcacttcccccgccttattagaggagatgacctgctggttcagctgggtgatgagcattccgttgtccggaatgttggcaattaatgcgccaaaggcaatcggaaccatcagaagaggttcgtactgcttggctacacccaggtacaggagaagaacggcaatgccccacatccctaccatttgccatgatagggagaagatgcccatcccctgtaaaaaggtgattaatgaatcaaaaagactcatatggaataattattgtagcggtttttagtctgagtcggagtccggacctgtgttaggggggccgggcggctcccgccgggattaaccaatcttggccagcgcctgtccttcctgaaccgtgtcgcccgcgcttacgcagaaagcggtgagcgtgccggaggcgggagcgtaaatgatggtgttcatcttcatggcttccagcgtcaggatctggtcaccggccttcacggcggtgccgggggcaacgtccagggaaacgactttgccggcgagcgggctgggcacgtctcctgcgccggcggcggccggggcgggggcgggcgtgggagccggagcgggcgccgcgacaggggcggaggctgcgggtgcgggagccggggctgcaacgggggccggagccggggcggaggtagtggaggagacctggtccaggagttctacggatacgtcaaataccttgccgtctacggtgatgcgaagtttcttcataataatgtatggtatggaatattaagttaaatgattcccgccgggggcgggggtaagggtgaataatgcagtggttcaatgactgggccggatgcggtgggaggcgaagatttccgccctgcctgcggccgcatagccggagcccggggattgcttgatttccacgatgcggtggctcatgccgtccaggcctgcgtccacggcggcggagatgacggccaccatttccggcgtgagctccgtcatggcggagtccacggctgcggagaggatggcgagcatttccggagtcatgcccggcttgcctgctgccgcaggggcggcggcaggcacaggagcgggagcggcggaggccgctgcggccttggctttggccttgttctggatggaagcggcaatggagccgctgatggtcagaatgacggccaggccacccaggcacatcatgaccaccaggatgccgacgatctggtagtccagattctccatgatgttggccatgccctgcgcaaaggcgagtgtcgtaagtaacatatgaatccgttaagatggatgttagagcggaatgttgccgtgcttcttggccggacgcacttccttcttgttcaggagggtgcgcagggcgaaggcgatcttggcgcgggtttcttccggattgatgacttccgtgatctggcccatgccggccgccacgtacgggttgtagaaggcctcccggtattcttccagaagttctccctggcgcttggccttttccgcggggtcttccacggctttcagctcgcggccgtaaagcaccggaacagcgccttccgcgcccatcacggcgatttccgcgccgggccaggcgaaaacggcgtcagcgcccaggtccttgcagcacatggcgatataggcgccgccgtaggctttgcgcatgatcagggtgaccttgggcaccgtggcctgggagtaggcgaagatgagcttggcgccgtggcggatgatgccgccgcgttcctggttcttgccgggcaggaagccgggcacgtccaccaggttcaccaatgggatgttgaacgcgttgcagaagcggatgaagcgggcggccttgtcggaggagtcgatgtccaggcagccggccttcacgttgggctggttggcgatgatgccgaccaccacgccgcagacccggccgaagccgacgacgacgttcttggcgaagtccttgtgcacttccaggaaatccccgtcatccaccaggcggctgatgatgggctggacgtccaggggcgtgcggttgtcgccgggaatcaggtcgctcatgccttcgtccgcgctcaggtcaagcggggtgtccagcttgtggggcggttcttccgcgttgttggcgggaaggaaggaaaggagcctcttcaggatgtccagggcgtgcgcgtcgctgtccgccacgaagtggacgttgccggacacggaggcgtggatggccgcggagccgatgtcgtccatcgtgcacttttcatacgtgacctgttcaatcaccttgggaccggtgatgtacatgccggcgttgccggaattgcgcatgatgatgaagtccgtcagggcgggggaataggccgcgccgcctgcgcagggccccaggatcatggatatctgcggaaccacgccggaagccagcacgttgttgtagaacacctgggcgtagccggacagggccgccacgccttcctggaggcgcgcgccgccggagtcgttcaccgtcaccatcgggatgccggctttcagggcgtacttctgggcgtccgcaatcttcatggcgtgcatgtagccgagggagccgccctgggccaggaagtcggaggccgcgcaggcgaccggacggccgttcacgaggccgaagccggaaacgacgccgtcgccggggatttccttcttgcccatgccgaagttgtggcagttgtggcgcacatgcatgccgatttccgagaaggtgccttcttcaaagaggtaccccatgcggtcgcgggccgtcatttcgcccttttcgtgtctcttgtcgatcttttcctgaccgccgctgaggatgaccttcttgcggcggctgttcagatcgtcaatcaatttgggatcaatagccattggtatagtggtatggtggattcggagaatgttacttgccgcatccgcaaccgccggggtgctggcagaattcggtcagcacgccgaaggtgcacttgggatgcaggaaggtgacctgcgtattgtgcgcgccggggacgggcgggtcgttcagcacggtaaggccggcttccttggcctgggagatgttgtcagcaatgtcgttggtcttgaaagcgatgtggtggatgccttcccctttcttctcgatggccttggcgatggcgctttccggagaggtgggttcgagcagttcgatgtggactccggcaacgtcaaacatggcgacgcgcaccttttgcgtgggcacttcctcaatgtggggctctccgagtccgagcgcatcacggtagtagggaacggtggcgtcaaggctcttgacggcgatgccgatatggtcaatttgttgaatcatatgcgtatgatggttgtagggaatgcaggtggaagcctgcaatacatcaggagccattaaagcggattttttttagatgtgaagcgaaaagcggaaaaatggcgaaatcgcgcccgctccgtttcacctgcttgattgccccggaagatgaggtatggtaggggcatgttcaagaggggattagccgtattgttcctgctggcgtcgtggttttccgccgcgtgtgcctatgagctgctgcccgcccatgtggccgtggtttacaacggaaaatccgagctgagccgccgcatggccagggagtatgcgcgggtgcgcggcgtgccggaagggaacctggtttccctggactgcccctcggccaacgagatttcccggaaggagtatgaagacctgatccgtgcgcccctgctgcggacggcgcaggagcagcggtggtgggtgccgtccggcattgcctccgcccccatgatggaccggaagatttttgcgctggtgctgatggcggacctgccaatgaagatacggcatgaagcgcccgttccccctcccgggaaggatatcaaccagatgcagacggaccgcgccgccgtggactccgaactggcgctgctggcggtggacggttatgagaggaaggcctgggtaggaaacccctattttgacaggaaggaggattttgtgggctccggcctgcccacgttcctggtgtgccgcctggacggcctgacggcggatacctgcctgcggctggtcacggaacctgcggaggtggagaagaagggcctgtgggggtgggcggtggtggaccggggcggcccctacgcccagggggaccagtggctggattccgtgttccgccgcgtgcgggaagcgggaatccccgtttacctggatgactggccccagactcttccggagaaatttccgctgagccgggacacggcgctttactgcggctggtacaccgggaatgcgaacggtccgtttacggacccaaccttccgtttccggcccggagcggtcgccatgcacctgcattccttcagcgcctccgatttcaagattcccggcagggggtggagttccgccctgctggaaaagggggcggacgtgacggtggggaacgtgtatgaaccgttcctgggcgcgtgccaccgctttgacatttttgcggaccgcctgctggacggctataccgtggcggaagcctcctggatgagcatgcccgtactatcctggcagggggtggtgttcggggaccccctctaccgtccgtacgcccgcatgaaggacatggacgtgaagccgacggaagaggaccgctatttccagggctggtgggcttcctctgtacagttcggggaccgctggcgggaccgttccgcgcgcctgctggaatccgcccggaaggcaccctcctcctgcctttatgaagcgctggcgctggaacacctgtaccggaaggagccggcacgggccggggagctggttttctccgcccttgacggcgcgccggacgcccgcacccgcgcccgtcttctgctggagtccctgctggcggaccgcgcccagggcggggacaaggccttcctgctgcggatggacagcgtccgcgccctcatgtcttcctccgcctttctcccggcgctggaggagtggcatgcaaggatagctccgccgccgcccccgcctaaaaaataaaattaaggccgtacggcaaatttggattgccttttaggggattatggcccatattctgcgtcccgtaagttttccttttactgatattcaccagcaatagataacacaagatgaacattatcaacaaaatcgagcaagagcaactcaaggcggatgtgaccccatttaacgtaggtgataccatcaaggttcacactcgtgttattgaaggcggcaaggaacgtatccagattttccagggcatcgtgatcgccaagcgcggttccggcatcaatgaagctttcacggtccgcaagatttcctacggtgaaggcgtggagcgtgtgttccccctgcacaccccccgcatcgccaagattgaagtcgtgaaccgcggcaaggtccgccgtgccaagcttcactacctgcgcggccgtatcggcaaggacgccatgatcgtgaagtccgccaaccggtaatcggaaaaattgctatttttgctggcccggcccgccgtgaggcgaggccgggttttttatgcccggaaggttttattccaccccggaggaagaaggggccggacgggaaaggaaggcgtgaaaaaattttcgtgaaaccccctgtgagggcaacacggtttttcccggtgaaagttccggaaagggggagagaggctgaaagaaagccggcaagaaaaaggaacgggatggaacaagtcctccggcttttccgttccttccggcggggctttgccggggggagggagctaatcaggaaggcaggcggttggccagcctcttttgcaggaaatagaagtggagcatcatcagcacggaacttgccaggctcaccaggaaggccgttccgttgtacatgatgacggggcgcaccatgccgttcagcagggcttccagctcccggtccagcgcaagcacgttttccgggctttcttccgcccatgcccggagcgtctccgagaaatggaacaggggctggaacagcgtatacaggaagatgagcagggaacccggcacgctgacggcccaggccagccatatccagccttttccgcgtgaagggccggggaaggagagggccttgttgacgtccagcatggcttgaaggggcatccagatattgcccacggggaggaagaaggaaaggacgcagagcaggggagaggcgcgcatggctcccttcttcaccgtttccgcattctgcgccagccggtaaaccagcatcagccagcagaccaccagcccggccatggacaggtaaaacaggccgccgtccagcgtcaacggagcggcggagcttgcatccgccctggcaagggagagggaaagggaggcgcggtccccttcctggagttccttcatggtttgagccagcgtttccgagatggcttgctgaatcaggggaagatcgtggaaaagcagatagaaggtgcccccggccagcgccagggcaaacaggcacaggaggaacaagaggacgccgagcttccggaggggcggaattccggctgaaaacgcttccgcaggcattattcttccgcaggtgcgggggccggtgtttccgccgcttcttccgggccgtatgcctccacttccgtcagcgccagcggatgggccggatcggtggattccacgcgcagggcgcgcgccttgaccggagcttccagcttccaggtggtgacgttggtggatttttccgagggtgtggtgttgaaggttttttccgccagcacgttcttgtcattgtcgtacagaatcaccttgaattcctccatggtgcccagcagagtcaggttggctggcgtgtaaataaccactttttctatggtgcggttggtctccttgccgaagtcgatgccgaaccaggcggtttttccttccgccacgccggtggcgctgatggaaacgtcggaaagctcggagctggtattgccgtccacggccttttccggaccgtaggcgcccagcatgttgcggttggagctctggcgcaccttgacgccgggctgaaggctccagttgactttgccgggttcggcggagggtttgggagctgcaggcacgggttccggatgcgggagcggggcaggtgcgggaaccgcaggggccggagtggtgttttccgcgacggccggggcagagggcgcaggtgttgccggagcatggcggcgcgcttccctgttcgcttttctcgccgcatccgccttcgcgttgttttccttctgcacctgttcgttgtagtcattgcgcattctgacgacgtccttcttgtacaggatgcaggtgtaggtcagcacaatgcccacgatcagggccgggataaggtagtagtaaacattggtctgccctttctgcatattcatggcggggacgggcgttgaggacggccggggaggaatggctgccgcgtttcttcccgtggggctggcgatggccttgtccaggtccgtgataaagtcccccaggttccggtagcgttcgcgggtgtccggattgatggcccgggagaccacggcgtccacggcgtcgctgcacttgatcagggtggagggcatggcgaagcccgcttccatcggcgtcttgcgggtcagcaggatgtagagcgtcagccccagggcgtaaatgtccatgcccggcgtgaaggcggcttccgccccggtgacccattccggagaggcgaagtcccccatgtctaccgggggctgcgcgggataaatgttgatgggcagcagcagggcgtctccgccgtccgcgcgcagggaaatcagcttgggcgtgatgccgccgtgaaagatgtttttccggtgcagcgtcagcaggccttccgccatgttccgcaccaggttgagcgccgcctggggggatatctgggggagggtttccaggtccgccaggcgcggatagggggagtgttcggaaatgatgaaggtgaacggtcctgcctgtcccacttcgtaaacgcgcagaaggccctggtgcgcctgttccacaatggtgagggagcggacgatgaattccggattccagccgaagactccggcttcctccgtggggaccacccgcagcatgacgggagcgaaattggatttcagggtggcggtgaaaatttgctgggggcctttggccccgacaagctggatgttttccagctgggggaagagggcggaaatctggtccatggaaagggaatcgtcggcaggcatggaaaagggaggtggaatagtatcggcaaacagtctaccttaaaatccttgccggaagcaactctataagcgggcatattttgctggcgggatgtcctgacgctgaacggaaaccgctcgtgccgggccggaacggccttttccgggcggggtggacgctctcctttgaagaaggcgtcccgaggggccgttctttccgtatccatacggttgacgggcctgttccttccgctggcgcaatggtttttcctgacggggaagtttgttggaaaaggcggatgccccctccgttttcaggaagggttgtttcctcttcgttccgtggccggaagacggcctttttgcctgccgtccggttaaaacaggaggggcagaagccggaaggccgaaccggcaaattcagcggggagtttgtgtttgtccacgattgcccgaacctcctttttactcaggaaccgttcttcctttttcgctttgaacgcggtccagtcaaccatgatggatgacaggagctgggacaggaaatcatgcatgcgaaagagcggggtatttccagaggcccggcggggagccgcattcctgcattacggccttttaaggatgatgggcggggcggggttggtctgccacaccggggtggcggcccgtgcgtccgcttcctccagcgtctggcgccccttgaccttcatcaggtgttcccggaggatgcgccgcagttccacggcggcggccgggtcatcctgcacgctgtgcccggacgggacgattttttcactggcgctccagtccagatgggaggagcggtacttgaccacgccgtcggaggagtggggcgtatcgttcctgcccctgtccccgatgatggaatggacgggaacgttcgggtccccgcgcaactccgacatgtacttgaccagggaggagttcggggaaagctggcggatgctggtgagttcgtccttcagctgcaggggattgagcaggaacatgccgcggctgagggtggcgatgcgggtgacttcctccagcatgtccgccgggagatcgatcaggcgctggcccagccgccctatccagttgtccgcaaaggtggagccgcggtgcggggtggccatgtacacgatgcgcgtgacgcccctggcgggggagaagataaaattgttctggagctgttcaagcatgggctcgtcacagtgcaggggttccagcccggttttccagttctccagcgtcatgtctgcaaaggtttccgggggaagctcaaagaggcccttcatcagcgtccagggcttggtggagttgttgaagcgggtgatgaggccgcccatggagtgccccaccatgacgatgttgttcatttccctggagtcgccgcggggattgtattcctgcatgagttcctccagggccttccgctgcctgctggccggaatggtccaggccaggccggacggatagccgaagaaccagaactggtagttttcccggatgacgggatccaccagaaggcggttggtcaggttggcaaaggtggcggggccggacatcaggccgtgggtgaagaccacgggaattttccgggggtcatagggttcggaaaaataaagccccatcgtattgatggcctttttgggacggaacgcgcccagcagttccgttccgtccgcgtcggaaagcttccagaaaagggcgatgggaacggagaagttggccgccaggggctgacgcaccttgtttttgccgatgaagacgtgctcattcatcagacggggaatggtgcggagggtgggcttcccgtccaccatgcggtcaaagtccaggatggccgtcagcgtgtgcacgttcccgttgtccttgagcacgttggcatggggccgggagacgccctggggcgccaggcccgccaggggaatgcccattccctccacggttacgctttcccgcaggcggaaggtggggtccacttcgtcggacatgaagatggcctcgtagaaccaggggttgctgtccttggcgtaaggagatttttcaatgatgaaggggaggctttgacgcttcttctcattcatgccgccctcccgtttggcctctttcaggtgggaggccagcttccggatgcacgcgttgtatttttttctggcttccggccattccctgctgcggtggggagaggagaggatgagccatgcggcctgggcttcccggatggctgcggcgtcatcctggtaatgggcgtacgccctttcctgctgctggtggtgcagggaacagccggaaaggcccatgagaaggcctagaagaagggcggaagccgttttcatgatgaacaaggagagaagggggcggagaggtcaggagagcatgtccagagcccggttcatggacttgaggaaggtctgaacttcctcttccgtattgtacagggcaaaggaggcgcgggtggttcccgtggttcccagggcgcacatgagaggctggcagcaatggtgcccggtgcgcacggcaatgcccatctggtccagcagggtgcccaggtcgtaatggtggatgccttccgccaggacggagaccacggcgctgtgcggcacgtccggggccagcacggtcaggcgcggcatggccttgaggccttccacggccatgtccgtcagtttctgttcatgggcggcgatgttgtccagccccagtccggagacgtagcggatggccgccgccagacctaccgctccgccaatgttgggcgtccctgcctcatatttgaaagggatgtcgttgtagacggttttttcaaaggtgacttccttgatcatctccccgccgcccatccacggcggcagcttttccagcagctccctttttccccacagcgcgccgatgccggtgggtgcgtacagcttgtggccggaaaaggcgtacaggtcgcatcccagttcctgaacgtccacgttcatgtgggagacggcctgggcgccgtcaatcagcacaatggtgtccggcctgttttccctggcaagcgcggtgatctcctgcacgggattgattgttccgagcgtgttggagacgtggcccacggccacgatgcgggtgcggggggaaagcaggttccggtaggcctccatgtccagcgtctggcccggcgtcagcgggactaccttgaggaccgcgcccgtgcgttcgcagagcatctgccaggggacgatgttggaatggtgctcacaggcggtcaggataacttcgtcccccggcttgaccatgccggacctggcgatggtgtctgccgccaggttgatgcccatggtgcagccggaggtgaacaggacttccgccgtttccggcgcgttgatgaaccgggccaccgtttcccgcgactcttcatgcgcctccgtggcaagctggctcaggtagtgggagccgcggtgcacgttggcgttctgcgtttcataataattccgggtggcatccaggacggccaggggcttctgcgtggtggccgcattgtccaggtaaatgagcggtttgccgtgcacgctggtttccaggatgggaaactgcgggcggatggttgctgtgtcaagcatggctatggtacgagtgagggttctttgcgcaattcgtcccagcccccttccagaatgaagatgggcgcgcggatgccgtattccggctttttcagttcattggctacggctgcgctggaggtgcagtccctgctgcaaaagatgacgatgcagcagcccttgtcttccgccgtcatcagggcttccatggcgttggccaggagttcctggtaattggcgtccgccgggcggatggggtagacgggggcctgcgtgatagtgtggcgttcaaagtcgtcctgctttctggcgtctatccagatgacttttcccggccattccttcagcacctgggccaggcacacgtgcccctcctccagcgtctccggattgcagggcggcgtgcggaacggctggatgacgcgcaggtccagcgcagcgatgcccacggccagcaggaatacggccagcaggagcttcagggcggtggaaagggcgtctctcatgtggggaaggtcagttttccttgatggtcaggaaccccatctggcgcttgtagcgcggcacggtggaatccgtgcgcacccagatggtgttgaaggccggcttggccgtggacctgggagtgacgatgattttgtattccctgcctttcttcacggtcacgggctcatagtcaaaggcgtccccggtcaggtccaccgtggtcaggttgacgggcagttccttggagatggtgattttaatggtcttgggggcaggggcttctcccctggtccattccagcttgcggggttccatccggatgatgtccgggatttgcgcgcgtatcaccagcttgtaggcggagccgttggcgtgcaccgtcatgtccttgtccacggtgccggaaaagttgccggtcttcatcacggcgctgatgacgccggattcccccggagcgtacgtcagcttgttatccttcgccccggcggtggtgcagtcgcaggagacatggattttgctgatcgtgacgggaacgccggaggtattggtgaacgggaaggaggccgtgatgctgtcctggtccggagccacctttaccggaaccaccgtttccttgaaggacagttcgtttttgccggaggcgaggcccccgcacagcagcagtcctgacagaataatggtccggatggtcatggtcgtttcaggatggtttttcctctttcttcctggcggagaagatgctggcgatgaagaagatgatcgccgccacgaagatgcaggagtccgccacgttgaaggcgggccagcggtagttgaagaggggaatggtgacgtcaatgaagtccaccacgtagccgttcatgagcttcgtgaagaagccgtgcggctgttcgtagggaatcaggaagccctgcatcaggcggtccgtcaggttgcccgccaccccggccagcagcagcacataggccagcttgagccataccgtatggaaaaagtttttccggtagagcacgaccagggccacgatggcgagcacgggaatcgccaggaacaggtagctggaccatgccgttccgttgcccagcccgaaggccacgcccgtgttgtgcacgcgggtgatattcacggcgccgtccaggaaggaaatgggttccagctccctcagcctgttcagggcgtccaccgtgttcgggttcaggtcctggaactgcgccatgtccgccgccggtatgtgcccgttcgtggcgaagtccagcgtgccgtccgcattgacgtggtggaagcccggaaagtccggcaggtaggcgtacttgtggactttctcgttcaggtagttcagcgggaagcggtggacgatccacagcttgcttgcctggtccagtacatacagccctacgcccagcaggctccaccagagccagccgggaggcgttttcttatgggggccgggttccttttccgtctgggtatccataaaagatcggggaatggtttcagttcaggaaaggacttccgagcagcgttcgcacacgtcgctgccgtccgccgcgggttcataccggcggcagcgcgggcacatggcgtgttccgttttggcggcggtggccgccagctccggaccgctcttcacgtccagggctgcaatgatgaagaattccgtggcaaaggcgcggtcttccagcagcgccaccacgtcctcgctttcattcgtgggaacggtgagggtgatggaggcctcattgttcttggagaacgccttggctttcacctgctcttcaatggctacctggatgacggacttgatttcctggaggcgggaaatggcggaggaagcctcctgggtgtcgtactccggcatcggcgcggggaagtcctgctcgtgcacgctgccttcatacccggcgtattcccaggcttcatccgccgtgaagaccaggatgggggccagcaggcggcacagggccttgaagacgatggtcatggccgtctgggtggcgcggcggcgcacggaggtgacgtcgtcgcagtacaggcggtccttcgtggtgtccacgtacagggcggaaaggtcgctggtgcagaactggttgatgacgctgaacgccttgcggaagtcataggcttcataggctttcagcgtttccttgatgacggcgttcaggcgttccagaatccagcggtccaggatgggcatgtgttccggggcgaccgcctgcgtggcgaagtcaaacccgctgatgttgcccagcaggatgcgcagggtgttgcgcagccgtcggtagggctccgtgacctgcttgaagaggtcttccccgaaggggacttcattctgccagtccacggaggcggcccacaggcgcacgatgtccgcgccgtacttgtcgtagtagtaggcggcgtcaatgggcttgccgctcttggcgtcggacttggaggtctttttcccggtgtccttgtccaccacgaagccgtgggtcatcacggccttgtacggggccttgccgcgccaggcgacggaaagcatcagggagctctggaaccagccgcggtgctggtccgtggcttccaggtacaggtccgccggggcgtccagcccggggcgggcgtccatgacggccatgtgggaacagccggaatcgatccagacgtccagcgtatccttgcccttcttccaggtcttcggcaggccgaggcgttcgcacaggtcttcatcggaaagctcaaaccagatgttggagccgtgggcctccaccatatccgcgatcttgcggaccagggcggcgtccagaacggcctttccgtcttcgtcaaagaagacgggcaggggcacgccccaggtgcgctggcgggagatgcaccagtccgggcgcgcctccacggtgccgtaaatgcggttgcggccccaggcgggcagccactgcaccttgtctatttcttccagggcctgcggtcgcagcctgtccatggagatgaagaactgctccacggcgcggaagatgatgggcgtcttggaacgccagcagtgcgggtactggtggcggtattcctccacgccgaaaaggttgtcgtccttctccagcatggagatgatgtccttgttggcgtcaaagacgtgcttgcccaccagggagggaacgcccacttcttccgtgtacttgccgtcgtcgtccacgggggaaaggacgggcagtccgtataggcggcctacgttgtagtcgtccgccccgtggccgggagcgatgtgcacggcgccggtgccggtgtccgtggtcacgaagtccgccaggatgatttttgacgtgcggggaaggaaggggtgccgggcctcgcagttttccagctcggcgcccttgaactcgcggatggtttccgccagggcccagcccgtcttctgcgcgaaggcgtccagcaggtctttcaggatgatgagggtttccgtctggccgtccttcatgaacttgccggccacatacgtgaagcgcgggtgcagggcgatgcccacgttggcaggcaatgtccacggggtagtggtccagatcaccatggaggccttcaggtccaggggattgtccagcagcgggaagcgcacgaacacggaggagctgatcttctccttgtagtcgatttccgcttccgccagcgcggtataggccccgtaggaccactggacgggcttgcggctctggtagaccgcgccgtcttccaccagcttggcgaacacgcgcagaatgttggcttcatacgccggcttcatggtcaggtagggatgctcccagtcaccgaaaacgcccaggcggcggaaggaagtccgttggatgtcaatgaagccttcggcaaattccgcgcagcggcggcggatttcagccgcgtccaggtcacgggccttctgcaccaccttgaattcgatggggaggccgtggcagtcccagcccggaacgtagggggcggcgtagccggccatggtcttggacttcaggacgaggtccttgagaatcttgttcagggcggtgcccatgtgcacgtctccgttggcaaagggagggccgtcgtgaaggaggaaacggggtgcgccctgttctatcctgcgggacaaaattcgttcgtacagcccggtgtcttcccactttttcaggcgtactggttcgtttttcgtcaggtcccctctcatggggaagccggtctccggcaacaggatggtgtctttataattcttttcgggcgcactcatgcccgaaaaaggtagcaccgggcccgtttccggtcaaccctgcggtgcggcacaaatcagggcctagcgcattcattcccgccgtgttccgggggggcgcccgcaccggaaggcgcattcccgcaggcaggagccggggaggggagaattccccgttccgcgagccattgttccgcggcctccggccatttgtccgtgggctggccgcgcttctccatgccgtacccatgccctccggagggataaaaatgcaggctggagggaacgcccttttcccggcaggcctgttccatcagcctgctgttggcgctggctacgccgtcgtccagcgcgtggacgaggaacacgggcggcgtctgcggcgtcacctgccgttccgcggaacacagctccgccagatccgcgccgggggcaggccccagaatcctgctgcgggtgcccccgtgggtggttttggggtccatggtgatgacggggtagatgagcagggagaaatccggccgggcggaaacgcttttcagcgggttttccgcttcttccggcagggggcggttccagagtgtggaggccatggcagccagatggccgcctgcggaaaagcccatgacgccgatgcggtgcgggtcaacccccagcgcggaggcatgccggcgcgttacgcgcagagcctgccgggcgtccagcagagggcccggaaacctgccgacggcatcattgctcccggaaacgcggtacttcacgacgacgcccaccatgccgtgctccgccgcccagcgggcgatatggccgccttccttttcaatggcctggatggcatagcccccgcccggaaaaatgcacagggccgcgcgcctgtcctgcggcttccatccggcgggaaagtagagctgcatctgcgcttcccccacgtccgtaatatgtccgggggatacttgtttttcctccaggtccgccgccttgagccccagggaaatccacccggaatgaaaggctccgtgttccgcgggcggctggagggcctccagcacggacggttcaaacggcgcggctccggcgtggccgtgagggaaggccaggaaaagggcgggaaggaggaaggcaagcttcatgctcatggtttattggcgagtgagatgacgagttgggaaaggccctgcaccacttccgcaaactggggataatccagcttttcagccgtgtcgctggtttcatggtagtcgtcgcagcggaggaaggccgtgtccgtggcggcaaaggagggaatgccctccttcatgtatccccagtcgtcggaccaggaaacgccgcgggtgtaatacgggaacacggcggaacggaccggaaagcggctcaaagcggcaaattcctccgcgcaggagcgggccagcttgcggcccgtgttggtggacatgaaggccacgtagtcgcagcggtccggcagcccggccaatccggcaaccacggctgactggcgttttttgttcacccgcggggaatagcagcccagcgtttccagggcaatcatgccgatgattctgtccttgcccggatggcgggcgacggatttggcgtgcaccacgctgcccatggagggcgtctggtaaaagggcggctcttcattggcataagccaccaggcacacgtcgtgcagggtgggagtggccctcagggcgcgcgccgtttccagcagggcggcaacgccggaagcgttgtcattggcgcccggcgttccggtacgggcgggtctggcgggaccgtggtcgtgccagttgtccatgcctaccttggtatcgtaatgcgcgcctacgatgagcattctggggcggagagatgttccctttttggtggcgatgaggttgtacgccgtcctgtccttcacggcgccgaattccccggagagcggaatgttcacggcctggcgcgtgacggcatagcccatgtccgccagggttttttcaatgtagcgggcggatcgctccatggtaccgggtttgtagacgttgcgttccccgatggaatccgccagatggaacacgtgtgctttcaggagtgtttccgtctggtccgtgtccggaatttctccgcttccgcagggggaaaaaagcttggagcaggagccgagggcgacgcaggccgccgcggtgagcagcccgtacttgagagtcctggatgagacattcatgggggagttggagagtggggagaggaaggaatgctagtggggaagcggcggaaaatcaagccgcgccgtttccccctttttcatggccagatcctttttcctgccctggtgcatgaaccggaacctgccgggacgggtggcggtggctgtggcctgcaccctgccgttttgccaggacaggtccaccttcagccctccccgggtgcgcagccccgtggcggaacccttcttccaatcgtccgccagggccggagccagcaggataacctggaagccgtcctgcgtgatctggctctgaatcaggcactgggccacgccggaggcaaagccgaagttgccgtcgatctggaacgggggatgcaggtcgaaaaggttggaattgatgtaatgcctcagcatggcgtacatcctgtcctccgcggcgtttccgtcgccaagggcggcataaaggttgatgagccatgcggtgctccagccggtcctgatgccgttgttccccttgtccgcgtacttgcgccggaaatcggcggacttgcgcacggcggcggcatattcaggcgtattgagcacgtcccattccgtgccgggaaacaagccgtaaagatggctgatatggcgatggcccttctgcatttcttcaaaaggctgcctccattccagcaccctcccgtcggagccaatggcaggctggggaatctttttgaggaattgaacggctttgaccagagtaggcgtccgtatgcccagctctccgcaggcgtaaatgtaattgcggagggactccctgcccagaagctggtcatgagaagtcccgttggaaacgtaggaaagcacgttggggcctgtgccgtccggcgtgtaaaatccggtttccggggagacgccgggcccggaaaggtaatgcccctggtcgtcctcctcaaaccaggacatgatgaaacgcgcgttggattccagaatgggcagggacttcttcaggtcttccctgtctccggtgaagcggtagctgtccaccaggtgggcgcacgcccacgccccgttcatgaggctggccccccattccgggttatttcctgaaaaataggtgcgtttccagcagtccgtgtaatggccgaagcagaatccgtcccgtttgatgaagcgcgcaaattcctctccatgagggcgcaggctgcggacgaattcaagatagggccgctggaattcccccaggccggtggcataggagggccactggttcatctggctgttgatgttcaggaaatagcagcccatccacgccgcccgcagctccggattccacaatccctgcaagccgcagggaagctgccccggcctggtgtggacaatcgtgcaaaagcggccgaactggaaaagctgttccagaaggtccggatccttttccccttgtttgacccgttccagccgctcaggggtggtcatggcggaaacctcgggaggggaatcccccaggtccacctggcagcgcatcatgagacgggaaaaataatcttccgtttccgccgccagttttttccagccttttttctgcgccttcgccagaatttgcctgttcttgtctgccagggaatgggtcaggggctcttccggcttccggatattgtaatccgtggaggtggaggagagcaccagcacttcccgcgcggaatccagaacgaccgttttccccttgcgggatatggcggcgccgggagccaggatgaccaccctgttttcaaactgggtgcccccgttgcttccctgtcccgtcaggacccagccatcgggccgtgcgtcaatccgggcggacgggtccggatgctgcaagtccagcgcaacgcggcacccggccggaagggtgcaggtgatgcggtaagcggcgcaatcgctggacggagccgccaggatttccgtggacaattctcccgtgccgaattgaacgcgggtggaagccttgccccgctgcatgtccagcgtgcgccggtaggaggcaggggagggaagcccctggaattccacctggaggagacctccctgctggtaatcccccgcgatgctgccggggggaaggatatccttccggaacacctggtccgcgctccggtattttccttccttgcaaagttcgcgcgccttgtccagggcctccgcggcgccttccttcatctggaaattcttcttcgcgaagatgcttccttcattgaaaacgacgatttccttcggaaaaacgccaaaagaaagaatgcccagccttccgttgcccgtgccgtagccatccgtccagatccgtgcagattcggtggaagtggcctgcatgggggcgggagcggcccggagggggatggccgccgcaagaaggcaggggaggaagaaatatttcaaggttgtagagacagtcatgagagaggatgggtatcccgtaaaagaggaggttgatgtaaaaagccgctattttttaaaccggcttccggtaccggcataaatgactgcaaacgctatgctgcccaccagaaggcacagggagacggacaggagcacggagttctggaggataatgctgatgagccacagcagcatggcgaaggccaggcagtacatgagctttcccatgaaccggcacagcgcgcgttcatcgtactgcttcttctgctccttgctcatcatattgtagcctgcgatgaggaaggaacattttcccatggaaagaatgactccaagaatgatgaagcctgccatcatggcgacgggtatcagaataggtgcatccataagccggaaaaatgggggaaatgaaagtccgcggcaactcgcccggataagtacgtagagtggtctttaagggaatacgttagggaaatggttttttttcagcggaagaaaaagcgtctgttttttctgccggaagctttcgcaaggcagcgccgcggcctgttttttgcgtcaaaacaggaagtagcaggagcagaaccaggcgatgatgagcaggccgcaggtgaattccagcagcagcccggtgagcattcccagcgcagcgccggagcctgccttgaaggcggccatgatgtcttttctggcaaagatgagttccgccagcagcgcccccaggaacggcatgaacagaaggcccacgatgggggtgaaaaggatgccgcccaccacggcgccgatgatggctccccagatgccggcggcggtgctgccgaattttttggcccccatgcctccggagagcttgtcaatgaccaggccgcccgcaaccatcagcgccaggacggtccattcccaccacgccaggtgcctgctgcccatcactccctgccagatgcaccctgccgcaatgataatgatgccggggagcatgggaataagcgtgccgatcagccccatgccgaacagcagcagggtgacgcaccagacgagggtttctgaaaggacgggtggcatgcctcccttcttatcaggaagggaggcgtgtggcaaggcttctgcccggcttgcggatgacggaaaaaaggggggaagtgcatggattgctgttgcggtttttgcgggcgtggtatagaatggcgcccatgactttcaccggttcttttctgcgtggctgcatggtgtgctcctgcgctctttctatgggtgttatgcccgtggtggccgcgtctcccgcggctgattccgccgctgtgcagaagctggctcattccctgaaagcccgtgtgggcatggccgcggtgatgctggacacgggggaggccgtggcggtgggtgatgagactgcctatcccatgcagagcgtcttcaaattcgtgctggccctgtccgtgctcaagcgggtggaccagggagccctgaatctggaacagatcatccatatacgcccggagcagttggtaaaagacacgtggagtcccctgcgggagcgctttccgcagggcggtgatttttctttaaaggaactgctgcgcgtgaccgttcaggagagcgacaacaacacgtgcgacctcctgtttgccctcatcggcgggacggagaccgtgcagaaggatttgaaggaatggggcatcagcggcatcaacatccggtttacggaagacgagatgctgcggaatcatgaattgcagtacgccaactcgagccgtccgtcagccatgaatgccctgctgcgcgcgtttgacgagggtaagatactgaacaaggacacgcagcggcttctctgggacatgatggccggctgcgctacggggactacgcgcctgaaagggaagctgccgcaggattatgtggtggcgcacaagaccggatcgggcttcaccactccggagggcgtgatcaccgccgtcaatgacgtcggcatcatcgttcttcccaatgggcggaaaatggcggtctccgtgttcgtcatggattcaaaggattccgctcccgcctgtgagaaggtgatcgcctccatggcccgctggctgtgcacggaatggcaggccgccgccgccaagtagcggacggccttccccggaacatgttttaagcttggaaagggggccgctatcaggcaaggtgtgccgcgttattcatgaagaacctattgagccggtacatcagcctgagcctggcgctgcggtatttgaacccgctgcggactttcttttccatcattaccctgatctgtctgctgggcgtatcgctgggggtgatggtgcttatcgtcgtgctgtccgtcatgggcggcctccagaaggaaatccaggggaacctgtttgcgcactccccgcacgtccaggtgtgctaccggaatgacttcggcgtgagggaggtgattccggactggatggaattgagcgagaagctcaagcacgttcccggagtccagtccacgtatgccctgatagaagactacgcgctggtagacgtgcagggacggcagaggccctgctttttccgggccatcgatacggaaaacaccgcccagctggaagatttgaagcacctggtagtggccggcaatgcggagctggacatgggggaaaaggctgtggtttcctccatcgtggcggagaacatggggctgaacgtgggggatgtggtccgggtgtacactacccgcaatttccaggaaatttctcacgcctaccagcagacggaactgccggtgctggcggaaaagaacgcccgggaactcaatgatttgaaggagtggggcaagtccctgaaaacggagggagagcgtgaaacggccggcaaggcctccgtggacaaggtattcaccctgctcaacgggctgctgtccgtcccccgcagggatgcggagcgctccagcctgatggatttgcttgccgtgctgaatgacggggaagccgtggacaacggcagggtggccttcccggaaggcacgcggaaggaatgggaaaccattctgggcggcttcaaggcggggcagaggaatgaggcggacatggaatgcttccgcaagctccgggagctggtcatgccgaaggatctggaggtgatcggcatttaccgggcctcccagcatacgcccagcccggacctcttcattccgctggtcatcggccaggaattgctgggttatgaggatgacgtggtgcaggccgtggccctgcgcgtgaacgacccctaccatgtggaaacgatgctgtcccccgtgatgcaggcgctggaaaaggaaaagccctcttccgcgtggacgctggaaacctggcatgaccgctttaacgcgtggtttgaactcatgcagaaggagcgcatgatgatgagctttgtgctctccttcatctccctgatttccgccttctgcattatggcggtgatgtttaccgtttccatccagaggaaaaaggaaatcgccgtgatgaaggccttgggcgccacgccgttccaggtggtgcgcgtcttcttgtggcagggggtcatcatcggctttgtgggagctctcctgggcgtgggcctgggactgctggtgctggaataccgcatgcagatccagggctttctggcgggaataggctttgacccgttccccgtggctttccacggcacggcgaacatcccggtggtgattgactgggcggagctggcgtggcaggcggtgaaagccttcgtcatggtcgtggtggcctccatcgttccggccctgatcacggcgcgccaggacccggcccgctccctgcgcagcatgtaacaggaaaccgcccatggatatttactggattcaggatcatgaaaagaagggcccactgccggaggtggaggtaatctccatgctggaggcgggcctcattccggaaaccgcccgggcgtggcatgccggatgtgcggaatgggtgcgcatccatgacctgccggcgctgaaggaaatgttcgccgttcgcaaggaagaggaagaacggcgtaatgtggaggaagatgtgccggaggatgaagcggcgcaagatgccgccgccggccccacgaacgcggattccctgccggaagaagaggaaacggctgtggaggaaggcacgcctctggtagttccttacccgtacgtccgttttctgggaagaacggcggacgtgatgatgcacatgacgctgtatctggccgtgctcaggatcttcggcctggccttcagccccgattttcttcccggttcctatgaagccctcctttacctctgtctcccgatggtgctcattgaaaccgcctttctgggaacgctgggcaccactccggggaaagccatgctgggcgtctccgtcagggactaccgggggaagcgcctttccttctccacggcgttccggcgctccctgttcgtcatggtgctggggctgggctgctttgccccctccctgatgctgctggccctgttcttttcctggtggtgggtgcgccgcttcggcttcactccctgggacaggaagctgggcaccacggacgtgctgaacgactcactcaccctccgcaaggtggtgatgacgctggtgcttgtcatcctgtgcctccaggtcatgtacgtgctgctgattccctggctgccggaaatggaggcgtacatgggcgcctccgggcaaatgtgacaaaaagaccggccgcgcgggatttagccttttaatcacctgaatttgtttcatacttgtcccagccatgccagaaatacacccaacggcagtagtgcatcctactgcggagatcgcggatgatgttaaaatcggtcccttttgcgttgtcggagaacatgtaaagctgggcccgggctgcgtgctgcacagccatgtggtcattgaaggaccttccaccttcggaagcggcaacgaattttttccgttttccgtcctcggcctgaaaagccaggatttgaaatacaagggggaaccgacctatctggaagtgggggacaacaacgtcttccgtgaaaacgccaccatcaaccgggctacggacatcggcggcacgacgcggatagggaataacaacctcttcctggtttcctgccacgccgggcatgactgccagatcggcaatcatgtgattttctccggcttcgccactgccgccggccacgttacggtgggggattacgccattctggcgggatgctgcgccgtgcaccaattcgtcagcatcggggagcactccatggtgggcgcgatggcccgcgtgagccaggacgtgctgccgtacaccattgtggaaggccatccggccgtgacgcgctccgtcaactccatcggcatgcagaggcgcggattttccgaggaagacctgcgggccgtacgcatgtgctacaaaaagcttttcgtcaacaagaagctgaccgttcatgaagcgctggaagagctccggaactcggactacgcggaaaatgcctgtctgaaaagaatcgtcaagttcgtggaaacttccgaacggggcttctgccactgaggccatgaaaacaggttttgtctttgacctggacggaacgctggtggactccattcccggcatctcccgcggcctgaacctggccttgaagtccctggggtatccggagcactccgtgaatgccatccggggaatggtgggcaggggcgcgcgggaactctgcctggcttccctgaaaggctgtttcaatggagaagtgccggaggaagcctttgaagcggtgcaccggggattcatgcgggaatacccccatacctggcaggacggcacggtgccgtacccaggcatccgtgaaatgctgctggaactggccgctgcaggccaccccctgggcgttctgtccaacaagcctcatgtggtcacgggaccgctggtgcgccatatcctgccagaggtgcccttccgggaggtgatgggcttttccgaacgctttccgcgcaagccggagcctgattccctgctgtccatcgtccgttcctggggaatggagccggagcaggtgtgcatggtgggggattcagcccatgacggcaacacggccgtgaacgccggaacgcggcttgttctggtagggtggggctacagttcccgcgccgcgctggacgccttccgcgtgccggtgtgcgccactgtggcggagctgtccgcccggctgaaaaaggtggacgatttgccgtttccggttaggtaattaagaagggaatttcttttaaaaaagcaggatgaaggatagtatgtaaactattttttgacgttaattttttaatatattatggtcatggaatcatttgattttagagaagaattgaaaaaaattcttgaatcgtgcgtagataaaatgttgaaaaatgatcattatttgcttgaaaacaaaacccacgagtgttcaatttcttttagaataggtcattatttacagaatgaattagattctttaaaaaaatcggatagattaaatataccagagaatcttgttgttgatgcagaatacaataaatgtttaaatggatcaaaaatatgtattgacgaacttggaaaggagagcctaatgaggcccgatttaatagtacatataagaggggaaaatgggtttgataataattttatggctattgaaattaagaaaagtattaatggttcgtgtgaaacagagaaagattattttaaattaaaaaatttgacttttggaaaaaatgaatttcaatatcaaataggagcacatgttgtcattgatctctctaaaaagagtagagaaattcgttggtttaaagacggttcaccagaggattaatagatctttatgatctgtaattttatattctttaaatttcttccggggcgtccgtcgatttggcctgcacggtaatgtcttccagagaaccgggcaggtccttggtggaagtgacgcccagattcttcaatttctgcgcccggggaatgaaccggtgctcaaaggaggaaacggttttgttatactgggtcaccgcctggttcaggctcttgcccagggaggaaaagtgccctgtgaggatggagcaggtattgaacaggtccgctcccgcctccgagattttcttggcattgtccgccagttgctcctgcttccagccgtaggcgacggctttcagcagggcgatcagggtggagggcgtggaaaggatcaccttgttctccgcgccgaattcaatcagggaggggtccgcttccagggccgcctggaaaaaggcttcccccggcaggaacatgatgacgaattcggggcacggggaaaactgggcaaaataattcttggcgctcagctgctggaggtgtctttttacgtccgcggcgtggcgggacatccactggctgcgctcctccagcctgtccgtctgcccggcattcaggtaggaggacatgggggccttcgcgtcaatgatgatggaacggcctcccggcaggtggatgaccatatccgggcgcacccggtcctcttccctggaacgggtctcctgcgtcgtgaaatcacagtattccaccattccggccagctccaccacgcggcgcagttggagttccccccactggccgcgcgagctgttgtggtgcagggcctgggaaagcctagcggtctcattcttcagggcttcattcccggaaaggatgtagcggatttgcgttttcaggtccgtataggcgcccacgcgctccttttccatctctcccagccgggactgcacgagtttcagtgactcgctcaccggcttcagcatggactcaatggcctgtttgcgggattccaggtcatggttggcctgctggcgctggctttgcagccgcgtttccgccaggttcaggaattgtttttccgaattccggaggacttccgcgctaatgccggcgaaggaatccttcagcacctcttccgcccggtggagcatctgtgttctatcctccgcccgttcctgccaggagcgggattccgcttcgagccggacggagcggtcccggtagcgcagcagcagaatcagcagtgccacgcaggcggccagcagcagaagggcgagaaaccagggaatcaggggagaagtcataagaagggtaaggcaatcagatgggggtggcgtaggggatggcgtccgtttcttctacgggttcggccaggggaatattgtcgtcgctgccgtccagcggctccgcatagggaatattctcttctgtatccggttccgccatggggatgtgcttttcacacatcctggtgggggcctggtagccggcggaagtttcaaaatacgccgtcttggcatactggcagccggaatgggccagttggttggactcccggcagacgagcacggcctgtccttccgaaccgggccgcgtgcggatggcgttggcggggtagccctccttctgggcggccagcatgatgtccacccagacgggaagggccagcgtgccgccgtagcctttctccagaatcttggtggaggagtcaaaccccacccatacgctgcacgtgagattggaagtatatccggcaaaccacgcgttcgtgtaattgttcgtggtcccggtcttgccgccgcagggggacttgaagcccagcgcggtgatcctgcccgccgtgccgccgggtttgcagacctgctggaggatggaggaggtgatgttggccgcccgctgggaatacacggtgcgcttgctcttggtgatggcgaagcgcggctggccctgggaatccgtaatgtggtcaatgatgtacggagtggggcgcacgccgccgttggcgaagacgctgtaggcgctggcgatgtccagcggggaggcctcccacgtgcccaggtaaagggccggggtgcgggaaatattcccgtggaagcccgccagttgggcggactggatgacgttggacagcccggcccggttgccgatgcgcacggacatggtgttgcgggaaaggatgaggccgaaggaggccggcttcatgccccggtacgtgccgtccgaattgcggggggaccagttggcggctccgcgtacctccccgtaggcgatccggtcgtctgaaatgcgggtgtccgcggaattgccctgctggaaaaacgtggcgtaaatgaacggcttgaacagggagccggtctgccttctggactggatggcgcggttcagcttggattcctccgcatcccgtccgccgacgacggcgaggagggcccccgtggcgttgtccatgactacggcggcagactggatgtaattgggcatgggaggctgcattccctccttccgttccgcgggcagcgccttccaggcggccagggctgcttcatattctgccttggtggtcagcttgttcttcaggattcccttcttctcacgtttggcttgcagggacgccaggtgcttcttgaaatccttgcgcgcttccagcgcttccatatgcttgttgatggcgtccagcgtggcgttctgcaaatccaagtccagcgtggtgtggaccaccagaccgcccaggcggatgtcttcttcttccagaatggcgtccagttctcggcgcacaaggtccatggcgtaattctcctccgaccgggactgaggagtccgggtgacgatgggttccgccagggccgcctgatactgcacctccgtgatcttgccctcgtttttcaacagtcccaggacgatgtcgcgcacttttttggcttcctccgggtgtttgatgggggaaaaatcattcgggccgtaaatgatgccggccagcgtggcgcattccgccagggacaggtcgcggggctccttgtcataatacccgcgcgccgccgccgcaattcccaggaaagtgtgtccccagaaaatgcggttgatgtaggtctccagaatctcatccttcgtgtaggtggcttcaatgcgctttgccagagccacctccgtcagcttggaatgcaggttgcgctcccggtggttgtaagtgatcttggcgagctgcatggtcagcgtggaagctccctgcgtggccctcttgtgcttgagcacctgtgcgaaggcgcggcccacgcctatccagtccacgccgccgtggtcgtaaaagcggttgtcctcacgcagaatcagggcgtcgatgaaaatgggggggacttcccggagggacacccgcttgcggttttccccgtgcagggtgccgatggtccggttcttgcggtccagaatcaccgtgcgttccggaatgttgctcttgacctcggaaatgtcatagcggttggaaatggttccgtaaaggaacaccaggatggaaccgattacgatgccgacgaagcagcaccccagcaggatgcgcaggggccagctgatgaaccagcggatattccgcgtcagggagccgatgaagcggaacggcatcagcaggacaaacagcagggcgccgaaaatcgtgaagcgcggcttgcgcggccttcctgcgcgtgcgggacgggattctccttccgcttcagggtaatcttcatactcctcctgcggagccggacgggcagcgcgccgcgggcgcgggggcggtgtgtcatgccgggaagaaccgctgcgggaatttctcgttctgcgggtggggccgggaatgactgccggaccgggatcttcctgcggcaaaccgggataggacggacggggcgcaggcctttttttgcgttccgtttggggacgggaagccgcctcaccgtcctggatgcgttcccgccaggagccggcatttcgtttccgtgatttgtcgtttaaacccatccgtgagggaattttatcataaacaaccggaatggtctaagcaaaagatggagcgtcatgtcgcaatccttagacaaattcgtaccggtttgaacgtttatatggtaggatatgtcctatcattcgattatcgataatttcatgatatcagcattcaggatgacgagtttttattacttggtcgttggggggcttgtgtccctgttgttaggaggaatgagtcttgcggggaatgtctcttccatggcggacttgcagaagcatgtgcatcaggtggcttccagggtcacggccgctacggtagcgctggtttccgacgggggggagacgggcagcggcgtgattgtcactccgcaggggctcatcctgacggcggcccacgtggtgggcggcgatgaaatcatgcgcgtggtctttgccgacgggcgcgtggtcaagggccgcgtgctgggggccaactttacgcgggacgccgccatggtgcagatcatggacggcggaaactatccccatgtggaactgggggaatccgacgggctgcatgtgggggactttgtggtggccctgggccattccaagggctttgacccggaacgccgcgcgcccatccgcatgggaaggctgtgcacggacggaaaacagcgttttctcatctcggaatgcacgctcatcggcggggattccggcggccctctctttgacctgtccggcaaactggtgggcattcattcctccatcggccccatgttgaaaatcaacaaccatgtccccgtctccgtattccggaaggactgggacaagcttctttccgggcggcactggggccagcttggacttcatcccatggctgacccggaatcccccgtattgggatttgccatgatggacgtgctgggcgtggacggagtggtagtggaagacgtggtggtcaactctccggcggataccgcgggcatcaagccgggggacgtcattacccacatggacagccgcagcctccgttccgtgcgggacatgctccgtgagctgggcaggcaccgtcccggggaaaccgttccggtggtagtggtgaggaaaggtacggcctacaaggcggatcttacattcggcaggcgcggcgatctgatgtccggcctgaaataccaggaacaaactcaaggatgatcatgaaatacttatgggcggcattcgcggcggcttccgcgtgtgcccaggaaatagcgtccccgctccctccggaccagatgatagccccggaggacaaaatcgtgctggatagccaggccaaggaaatcttccgggaatgggacaaggtggctgtacctgtgggtcagtccgtggtggcgctggtggccggcaatacccaggtggccctgggaacggtagtggggaaggggaaagtgcttaccaagttgagcgaccttcagaaggaacggcgcccggtcatgctggtggactcttccggacgggtgtatgacgccaaggtgctctttgccctgccggaacacgatctgctgatgatggacgtcccggggcttcccgctccccccattgacctgaactcctacgtgcaggcgcaggaaggggacgtgattgcggccgtgtcccccacggggcatgtcagtgacttcggggttgtttccgtggcgcagcgcagcctgcgggcggacgaccagccttacctgggcatcgtttccgatccccgctgggacggggagggagtcatgatcggcggcgtggaggccggaagcggagcgcaccgcagcggcttgctggccggcgatgtgctgatgaagctgaatgggaagccggtggacggcatgtactccatccgtgccgccatggtcggggtgcgccccggtgagacggttcccgtggaagtgaagcgccgggaccaggtggttgaagggaagctcctcacgggccccaggcccaaagtgatgaaattcccccagaagcgcctggacatgatgaactccatgggcaaccggatgagcctgaagcgggacgaattcccgctggtcatccagtcggacatgacgctgttcccggaacgcgccggatgcccggtcattgacgttaacggaaaatttgtggggctggccctgagccgcgccggacgtacggaaacctacattctcccctcctggatatgccgggaactggtggaaggggtgcttccgcaggtgcagcagtaccaggccggccgcggagaaaacattccggatgcccagcctgtggacgactcctatgatgcacggcgcttggaggaaaaccgccgcaaggtggaggacaagatgagccgccagggactggtgcctaaggtctattaagctcggttggtttccgggaggtgaagagatgaaccgcccgggagcctggagtattcgaggcatcttcgtgctcttcatgccgtccggttttgaccgggaggaactttctgccttacctgctgtttttacttccttctcttgtgggaatcatgccgttgttgtcccggaggaatgggttgccgcatgaggaaactaaatggcggcggcaatttctcctgccgggaaaacgcggagcattttattcaccgggaatggcggcaggatgggatgatggcgtaaaaaaacgggcagtaatgcccgtttttccgaataaaccggattggtttccggctcttgaatatctttcgcccccgtattgccggaggctgagggggaaaacttacttgcccgaagaggctgccaccggtttttccttgaaaatcatcagctccgttagaacgacggtgcgtccggtggaatccggggaaatgatcatcactactttccgcccggggtaggtggtcagcatcatgcccctgtccttcaccttcacgactttgccgttcttcaaacgggtcatgtacgtcaaattggcggcagtggtgcgggaaacgttgctgtccgtagagtccttgccgaaaatgtaaatggacttgctgggcaattcaatggcgctcttttctcccgcggggggcttgggaagctccagagtgaaggtgcgcccggtcagattctgaatgtaaacgcaattaagcggaagttccgcttcattgataaaatccagggtaaactctccgctgctgttcttgcctaccagcgccagggttttggggccaaggtcggtcggaaggggcttgctgacaagcttgttggtcggcatccccttctggtccaggccaccgaacagggtaataatcttgctcctgggataaacgctgcggcgtccgggaagggcggcgcggatttccactttctccagccttttggaatcaatgggcatgtaaatgggagaggggaggggcatgggcgtcttaaggacaaaccggatgccgttgacggcggcgggggagagggacttgtccacggtatcggccgccggggcgttcgtttccggtttagccggctccggcttggaaggagtgcgggtctgtccatggacgaaagaaacgcttccgagaaggcaggtaaaggcgaggatgggtaaaatgcgcatatattcgggggagtgaaaaataaaagggggcttttggccggcgcatggacccttgacggacagtcttgcgggagagaatgcagcaggctgaatccatcggagcgtgcaacagggtacggacgcaagccttgatggactttatatcccttgtgaagtacaggaatgaggaaggccgtgcaagctcaaagtagggatgttgaagataaaaaatagaaaattccagcggtaattggccccctttttctgccgggaaagcctgcggattcagcatttctgttacgcatgacctcatctgcacagggtaaaatagtatctgaatgaacaaaatggcttatgtgcagatacatggagcaatgatgaaaaacaagttatgtgacatctccacaggaaaataattgcatttaaaggataggaagccttggttattcgccttggccgggtaagatgcgttttgtgggaagggccctcttggcggaaaaagtgagataaagacatctgcggaggaaaagcatttgactggggcggaacttcggcatcctgtgcaatgttccgtgatatttatccgcaggaattttacgataaaatcatcaatcgcaaactatgtgtaagtggccggaatatgcttgatataggcacggaaacaggagcatatgaaactgcttgctgaaattgctcctgctgaattcgacatattgcatgaaggggctgttgctcagcttaaaaaataagtggtggataacgtttatagaagcggtttaatgacgtccctatggaatgtgggctgtaccttgtctttggctcttttaaataacggcaaggagagtaaaataatatcctctttacaacttttcactttttcgtcttcgggaaacgcttgaaaattcgttcgttgaggtcttccccatcgagcaaaaatgcagaagtctctgtactggtctgtctgtcgcgatggatttcgtgaaaaagctgttcccgcttcacataaaaactgctctggaatgcagtggaataattctcatgccgggggtggttacatggaatgatagaaacactcttttggaggttcgggataaaagatgcaggcccccgcggcttgaaatccgcaaaggcccattttgccagggtttcagaaggcctgttttctttaattggctgctttgtaagttactcgaacaaaagacgttccttctctttctggatagtaaacatgtcagcaagccggcctcgtacttgcagatttatatttttcgtaattctcaaatggaggctcacttaaaaaatatgcgtctataattgcaccccctcattattcctattacccctttaaaccttataacccctatctttctttccctccctccccttaagcacaaaaagagccgctccccgtggatgggaagcggcgctggccgggaagaagaaaaaaactctctctctcttttattacacctcctcgggagacagccagcggaaggagacgatgttgaacttcctcccgaacgccttgttcaccgcgctcagctccgtctcctccagcgctccgctcttcatgttgatcttcttgaccggcgtctccgggctgtccaccgggtccacgtaattgatccccctctgcaccaccgcctcgcaccacgcccgcgacagcaccacaccctcgcggttggtcagctccccgtaggcccggatcgtaaacgtgtcgtcgcgcgtcgttaaaatattgcccagcaccgccagcacgtcggactggatcaggtagccgggcgccgccgtgtacaccgatcccttggccgcgtcctggttcgggtaccctcccttgggcgtgatgaccatgtcggagagttcgtcaaaggtgctgttgatggagctttcgtcgatggccgcctgaagcgcccccttcacccccatctccccgctctgcaggcggcggttgacgaagtcggacatgttcaggaaggggcccctcttcttgacctcctggaccatgttccgggccagggacttgatctgcgagtcgctgagcgttctgaggtcggaccacgccatggcctccccgtccgggatgccctgggttacgcccaccgagccgtagtcgtccacgtgggacttgtcgctgctggccaccccgaagcgggagaaggccgtctggctgttgttgagcacggagggggtcccgctccgggagtagaggagcttgcgctttttgagcccaagcagggtggcttcccaggcgcgctgggaggtggagttgacgttgaagcccccggccacggtgaggtacttggaggcgtgcttgtagccttcgtcggtcttggagagttcttcgacgacggcctcggagggcttgccctggaggtcgggcacgaagcgcctgttggcaatgccggcggccctgttggaggaggcgtccgtggagaaggcctgttgaagcacggttttaagttcctccctgcccgtgcctccgatgctggaggggcgcgcggccagggaggaggcgaaccaggagtcccagagggcgtcgttgaccatcaggccgtggtcccagaagtcgcccagggaggcgtctcccatgatttcattgtgggagaagaccttgtcgggcgggagcatggggtcggcaaaggcgttgccgatccccacgcccggcacgccggactggtaggcgaagcgcttggcgacggccgccttggagtcgctcctgtaccatcccggggtgaggcggcagcctgcgaagccggcgaggctggagggctgctggaaggggagttccgcggccacgatcttgttgacctgctcggcgcccggtccgccgaagggggagagcctggtgccgtcgttggagaggatgttggagatggtgatggggaagaagtcgctgttggcatttttgacttcaaactggtaggggctgtagaggcgtccgagctcggaggcggtgggcatctgcccaccccagaagagagggctggagtgctgccatgtcttggcgcggtagtccttgccttccgggtaggctccgatcaccgggggcttgccccatttgaccgataccccgtagtaggcgatgaacgtggaatccaaagagggagttccgtattcgcccgccttcttggcttcttcattggtgccttcattatgttcccacatttccgccggaagcttaatctggtcgaccagaggtttttcccacgcgccccagttcaggttgaggatagccggcatggttttggcgaagatgtcgatttcagccgtgtttttcccattcagggaggaggagctgttcatcttgttgggattcatgagaccggcccccatgacgaaggttcccaaggcctttgatgctcccttgtccccgtatttgacggcgaggacatgattatcgggcgtaccattgagttggctggtatcttccgcgaagataatggaagccttggcgatgccctgctgattatatccactgccgtccagcagttcgtagcgaacaccgtccgtcaggttgacggcataggagctgacctggccaggctcctgggaccaaccttccttaagtgggaacctgtccggtttgaaatcaccgctgttgggttttgtcttataaacctcattgccattggcaatgttggaaacgaccggctgggcaaagacaacgatttctccagccttcaaggtagaaggttctcccttgatcgtggccccatctccactgagtttggatgtggtgcggaaagaggcgccaaagtcggccacctggcggttgttataagaagcgtttaagtaggggaccaggcaggattccccgtaattggacaattggccttcatccagctggttccatgcgaatttgatattgtgggaaagcagcaggggcatgaaacggtgttcgccgaagtaggcgccccagacgccgccgtcggctccggtcagtttcatatccacattgtaggggttccaccagacgtacaccggaatgacggcgatacggaagtcaatccatccaccgcggttgggatgcttgttgccgtgtttgacatagttaagtcccacgaaagaataaaagcgcagcaggatgggatggcgcatgtacgtgtagcggttgtccatcatttccatactggccgcagagtccgccgcaatcaatgtgctgggggtgcgcccattccattgcagggtggcggaagaatcttgtccgtccctcttcgtggaggagtcccacacgttggcccacaggtagagctggttccaggaaccgatcgggcggttctgttccgatgggtttccgtcctcggacgtatacggccggagaccgatatccgaggtgtctccgcggaaatcttcaggcagcttttcctgggaaaacataatgttgaggtcctttttaagacctccgaatttagaatccgatttttcttataaataccataatataagattttaagaactgattatcataaaaatgcattctccccgcttccttcctccttccagatggtttctccgtcaatttattctgcctgcaatgcgcttgtttgaagcaattttgagcttgcatggactgcctcttttttgtattgactagagttaagaattggctcttcgcaccttcgtgacagtggggatttttatatcctcaaacttgagcggaaaagtgcacgccggaacccaccattttcatgaagattaaacatttcactaaacgtcctatcaggcatgtcagcaaaggttttgccctgattgccaccatcaccctgatgatgctcctggcccttctcagcgttggccttctcaccatcgcatcctcacaggtccgcatttccgaaaaacagctctttgccgcggaggccaaatccctcgccaggttttccctggaagtggccctcgggcagctccagtgtgagctggggcccgaccagcgcgtttccgccaactcgggcatcctttcctccggcgccagcgaaggcaacgccccgtacatcctgggcgtctggaacagctgggatacctggctcaacaagactaactcccagggcatgaacatttcttccacctacgatacgggaagaaagtccatgttccgccgctggctcatttccgacccggacctgcgcaggctcagcacgctggaagcgggcaaaagcctgctgggcaaacgttcccttaccaaccaaaatttccgcagtgtcgccttggtggaccatggcacggtgggaacgcccgtaggcgccaagaaccaggacaaaaaggaaatctacgcccgcatggtgcgcgtggacgattcctccaagaccatggggctgaaaaagaacgctaactcacgcaaatacattgcgtggtgggtaacgggagaaaaccagaaggcgcgcatcaacctgatgccgcatgcctcggaagaaagcacggatgccctgacggtgatgcgctccacgtgggacacgcccggtcccgatttggagcccctcaacctttcttccatgatggcatcgagttccggaaacgacatgtccacagtcagaaaactcatttcccttgattctctgctggctaacagtaaaaacggccggctgaaagacttgggagaggtgtaccatgacatctccctggtttcttccagcctgctgacggattctaaattcggtggattgaaaaaagacctgaatatcatattctctcaagaaaagctgcctgaggaattccgtagcgacaccgcagacatcggattgcgtccgtatacctccgaggacggcagcccgaccgagcagaaccggcccattgcctcctggaaccagctcttcctgtgggccaacgtgtgggactcctccacgaagagggaaggccaggacgcttccgccacattgcagtggaacgggacctcccccagcacattgattgcgtctgacgccacagcgaacatggaaatgatggacaaccgctacacgtacatgcgccatcctattctgctgcgcttctactccttcgtcggcgtccagtacgccagattcagaggaacaaacggccagaatccctccgtaaatggcggattcatcaatctggccttctccgtcattcccgtctatgtatggtggaacccatacaacgtagacatgaaatcccagggggccaatggagaagtatggggggcctacttcggcgaacaccgcttcatgcccctgatgttctcccacaacatcaaaaacggcggcggtgtgggggccatgggcaactatacggaacatcccctgactccctacgttcaaaatgccataaacaaaaacgaccgccaggtggcggacttcggcgcgtccttccgtgacaaagtcacctaccagtcggacggctcaaccaacaagggtaatccttctaccctgaaagccggagaaatcgtcattttcgctcagcctattcccctgattgatgacgtgtccaaccccttccacggcaactccgtctaccggtccaaagataatggtattgacattaaaacggataactttgccatgaaggaaggctggtccctggattccgcccagaccacaggctactccgtcaacatgtactccggcctgaaataccagaattttgacggcaacaagtacctggacggagacccgttcatggcctccgccattttcgcccagaatgatgacgacctgaaaggctggtccggcacgaccgccgaccggacaccctccgaccacatcctcagccataaatatacggacgaattcggagccggttccaaaaagctgggaaccttcacgatgggggccggtctcatgagagcggagcagatgggacaacccaccaagctgaacggcgccaatacggcagaccccgccatcttctccaagacgatgcccgccgtgctgaacctgaactggggcgcgtgggaaaaacctctgcttgaaaacatcaaattcccggcggacatgtggaaaaacaataccggaccggaagagaacaaggaaaggcagggctattatggcgaggcggatccggacgctcttttcatcgcctactacggagtatcggtcaaatggggcaagcccccggtgatcggagcctacccggaaggcaaggactaccgcgccaagacatggcagcactccagccctctcttctggggtgggcagatgcccaccgcctccgagctcggacgcctctacagcccctaccagtttgaagtcaaaaatgccaacagcgacttcttccccatcaccatctccaacatcctctccaacgacggcaccaggctctcccccttcggcggaccgggcgccgagcaggtcaacaagatcgtggccgcggaactccccttccagcagccctccagcctcgccggcttcgcaggctgccgcctcaccccgggatggtacaggagcgactccaaggcggccatcgccaagcgcttcgcctaccagtccggcgtgccgggcgtggggatcggcaacgcttttgccgaccccatgctcccgcccgacaaggtcttctcccacaatgaaatcatgggagacgcctccctgggcgacttctgggaccacggcctgatggtcaacgacgccctctgggactcctggttcacctcctccctggcttcgcgcccctccagcatcggaggcacgggcagggaggaacttaaaaccgtgcttcaacaggccttctccacggacgcctcctccaacaaggccgccggcattgccaacaggcgcttcgtgcccgacctccagggcaagccctccgaggccgtcgtcgaagaactctccaagaccgacgaaggctacaagcacgcctccaagtacctcaccgtggccgggggcttcaacgtcaactccacctcccagcgcgcctgggaagccaccctgcttgggctcaaaaagcgcaagctcctctactcccggagcgggactccctccgtgctcaacaacagccagacggccttctcccgcttcggggtggccagcagcgacaagtcccacgtggacgactacggctcggtgggcgtaacccagggcatcccggacggggaggccatggcgtggtccgacctcagaacgctcagcgactcgcagatcaagtccctggcccggaacatggtccaggaggtcaagaagaggggtcccttcctgaacatgtccgacttcgtcaaccgccgcctgcagagcggggagatgggggtgaagggggcgcttcaggcggccatcgacgaaagctccatcaacagcacctttgacgaactctccgacatggtcatcacgcccaagggagggtacccgaaccaggacgcggccaagggatcggtgtacacggcggcgcccggctacctgatccagtccgacgtgctggcggtgctgggcaatattttaacgacgcgcgacgacacgtttacgatccgggcctacggggagctgaccaaccgcgagggtgtggtgctgtcgcgggcgtggtgcgaggcggtggtgcagagggggatcaattacgtggacccggtggacagcccggagacgccggtcaagaagatcaacatgaagagcggagcgctggaggagacggagctgagcgcggtgaacaaggcgttcgggaggaagttcaacatcgtctccttccgctggctgtctcccgaggaggtgtaataaaagagagagagagtttttttcttcttcccggccagcgccgcttcccatccacggggagcggctctttttgtgcttaaggggagggagggaaagaaagataggggttataaggtttaaaggggtaataggaataatggggacgggatggaagacgggaagtgggggtgttgcacaactgtaattctaccaatgcgttgctgattgtgacgatttcttaaccaggtttctcttcctctccttgggagaggataggtgccgttggatagaaggagggggccttcctggaaagataaaagcggtagtttattccacagccggtttcatatgttggagacttgcaaagaataccttcatttttacttttctgttccggtaacgggaagagcactgctggagaatgcattttttatgggcaaaggagtggtggtcaacatgcctttcagaagaatgaggcgtcgaatggataacgggatgtcctgaaactgcaataaggtttcaagtttccttaataggggaaagccggaacgcaagccgggtaacggcggatgccgttcagcgtgcggagatgtggcggctcctgaaaccgaagccgacggcaaaggtgaccagggtgccgatggttacgcgccatggaaaggctatttccggaatatattgcctccagtcggcgggcagggggatgagttcggtcagcaaggcaatgaccaggaagcctgccgccatggcaatgatgtttcctgaatcgtttcctctggtgcgcgtcagcatcccgagcaggaagatgccaagcagcgagccgtaggtgtagccgaagatgcccagggcgatttgaatgatgcggacttccgggtggtgcaccacgtaccacgccgtgatggaaccgacgaggatgagcagcagggagaagccggccgttccccagcgcacgcaccggaggagctgacgttccgtggcttccggtttgaatactccctggtaccagtccttggtggcggtggttgccagggagttgagagcggtggacagggaacccatggcggttgccaggagcccggcgatcagcagcccccggatgccgttgggcagttcatggatgatgaagtaggggaagacatggagctgcggcgtgtctgcggggagggacgccggattgtactggtagaagacgtagagaagaatgcccgtgaagaggaagacgatgacgatggggaagtccagcagcccggatacgatgactgcccgcgttcccgccttgctgctttttgcggccagcatccgctgtaccatgtcctggtccgtgccgtgtgtagccatggtgatgaaggtcgctcccaggaaggctgcccataccgtgtattcctgacccaggacatgggcgcattgctggaggaagtccaggccttccttggtgccccacgagaagaatttccagtcgtcccctccgttcatggcggctgagatggagttccaccctccgggaatgtgggagaagagaacccacagggcggagagcatggagacgcccagcacgacggcctggaggacatccgtccagacgacggctttcaagccgccgatggctgtgtaaatggtggtggcgatggagatgacgaccagcgcggcaatgtaaagcaggacaatttggttggcgtccgccgtggtgtccgtcatgaattggtaggcaatgaccagcagaatgcctgcaaagtaaagtcttgttccactggcgagcacccggctgaccaggaagaccatggaggccgtgcggcgcgtcaggagcccgaatcttttttccaggtattcatagatggagaccaccttgtagtcatagtagggtttgaggaagagcttgccgacgatgatgcggcccaggatagtgccgatgcagagctgggcgtacgtgaagttgcgggtatggtagccttcccccggagcccccagaaaggtggccgcgctgatttccgccgccaggatggaggccagaatggcccaccagggcagggagcggttgcccagggcatagtccgtcagggagttctgcctgcgtcccgcatagatgccaatgcagaagatagccagaaagtagacaacgatgacaaggaggtccgtgaacatgcctggaaagagaaggccttttccggaacagggtttccggaaaaggccccgggctgggtgaagggtcaggagcggctcttgtgttccagcgcggctgaaaccagaccggagaagagcggatgagcccggttgggtgcggactggaattccggatggtactggcaggcaatgaagaagggatgggagggaagttccacgacttccaccaggccgtgttcatcattaacggcgctgatgaccatgcctgcgttttccagttcttcacggtaggccgggttgaattcgtaacggtggcggtggcgttccgtgacgctgtccttgccgtacagcttgtgcgccagagttccgggctggatcagggctttataggagcccaggcgcatggtggcccccatggctttgattcctttctgctcttcctgaaggctgatgacggggtgggtggatttctggtcgaattccgtggagttggcatcgtccatgccgcagatgtggcgtgcgtattcaatgacggctacctgcatgcccaggcagatgcccaggaacgggatgcccttggtgcgcgcatattccactgtttgtatttttccttcaatgccgcggtctccaaagccgcccggcaccagaatgccgtccacggaaccgatcagggcatccgcgcctttttcttcaatttcttccgcgtctatccggaggatttccacgcgagtgtcattttcagcaccggcatgagtgaaggattcatagatggatttgtaagcgtcctgaagggcgatgtatttgccgactacggcaatccttacggagtggcttgggctgatgacgcgccccacgtaacgctgccagtccgccaggttgggagcgggaacgtccagccccaggcgcttggtgacgatgcggtctattttgtcctggctgaggtccagaggacattcgtaaatggtgtttttaacgtcgcggaaggcgatgacatttttggcttccacgttgcagaacatggcgattttcctcctttcgtcttcgctcatatcgtattccgtccggcagatgatcacgtccggctgaataccaatttcccggagcttggcgacggattgctgggtgggcttcgttttcatttccccggcggccttgatgtaggggagcagggtgacgtggatgaagcagacattgtcgcggcccacttccagcgcgaactggcgcagggcttccaggaagatgtggccttccatgtcccctaccgtgccgccgatttccgtgatgatgatgtccacgtccgattgttccgtgacttcataaaggcggtttttgatttcatccgtgacgtgcggaatgtattgaaccgttttacccagatagtctccccggcgttccttatgcagcacgctttcaaagacctggccggaagtaaggttgttaagacgggagaggttgcaatggacgaagcgttcataatggcccaggtccagatccgtttccgccccgtcgttcaagacgtacacttccccgtgctggaacgggctcatcgtgccggggtctacattcaagtaggggtcgaatttttgaagggtgaccttgagaccgcagcgttccagcagagtaccgatggatgccgccgccagtcctttgccgagagaggagacaacaccacctgtgacgaagatgtatttcatgattatggttcctaatgtatgtttaataagatttgttccacctgggccgcctgttccggcgtgtctacgcccacgctgacatggtccgtcagaatgactctgattctggcgccgttttccagcgcgcgcagttgttccagggattccgtttgttccaggggggtgggttcccagcgcacgtagttttcaaggaagtcccggcggtaggcgtaaatgcccagatggcgcagcggggggatgacgcggggatggcgggcatagggaatgacggaacgggagaagtacagggcgtcgccgttgccggccaggaccactttgacgatgttcgggttgtccaggtcttcctgcgcgctgatggggcaggccacggtagccatggacagggccccgtcagaaaccagcgcgtccgccagcctgtcaatcagggccgggtcaatgaggggttcgtctccctggatattgaccacatgagtggcggaggggaaggcttgcaccgcttccgccaggcggtcgctgccgctgggatggtccggagaggtcatgatcgccttggcgccaaaggccacggcggtgtcgaagatgcgctggtcgtccgtggcgatggcgatgtcgtcaaggcgggagcagcgggaaacgcgttcccatacgtgctggacaagcggttttcctgcaatgaggtgaagcggcttgcccggaaatctggaggacccccagcgtgacgggatgaggccgatgatatgatgaggagagtctgctgccatgagaagaggaaacgcatcgaaaggtagcaactccccttgaattagtccagcctcaagcatcagatgcgcccgtttttccggagtaggggcggaacggtcaggcggaaatggcgggcgcggcggcaggctgcggttttgcctccgtcttctggataatgagcggcatgtattccttgcggatgtggagggatacgtacaggccttcctttttggcgcaggagaagagtaccttgatgatggccagggagatgatgtccatggagatggtggtactatccccgaagatcagcagaaaggtgagcggcttgatgaagtagacggttgaaacgtaaagaatgcccagcttgtatttgtggttgcggtagattctgctgacgatccatgcataggtcatgccgatgacggacaggatgaggtacagggaaagccccacgtagccgagcgtttgaatggtggaaatggggccgctgtgccatagtccgttccaggcaaaggatgactggtcctggctgaggttgtaggcttcctcatagatgttggctttcacgatgctgatatcccgtgaaaagccgtctccgaataccttgtcctgaatgaagtgttcgcggtcgtccagagcccattcccacatttcaaagcgccagttcatggacgcttccgcgtttactctggcttgcatgctgacatccaggaaaggaagggctgaaagtgtgcgctggataccgtaaggaaaggaatggagcattcctgaggaggagaggagcagaagcaaaagcattccgaagatgggaaccaggatgcagaagaaccatcttttgtagatcagagatattgtgaaaaacaggagcagaagctgcgcaataaaggagcggaatccgctaaacaggactccgatggttccaaggacaagaagggcgccccaccagggacgtttgatcatctgccatacggagtagttgatgatgagtagttgaaccgccaatagggaaatttggaggaaggtcgattgccgcgtgtcttcggaggcggcgcttgccgagactgcggccgccgccgggttcgctccggcagaattcggtgaaaggatgccctgggcggttgagatcagcgtgaagataatggtcagaaaaacggcccattgaagcacctttcccagttcattgctggtggttttcagggaggagaggcaaagataggcaaggagcgcctgaaggaagaggacgtatcccttgcccccgtagtagtcttccagcacattcaggcccaggccgaaggggtggctcaggaagacgtagcccacatgcatgaacagcacgagaatgacagcgtccaggagaggggcggcattccatgtcagggttgaacgcttgagcatggcattccacaagtagaagggaatggtaatgccgtaggcgaagaggggtgcgtagtcctttagttccggtatgggcaggaagagcaggggaagccatatccacaggtaccataccttttccttcatcaggaaaaggacggccaggaggaagggggaaacagccagggcgatggaaaaggggtctccatccgccgacatgacgccgcctatgatggctaggagaatggcaactactgaaatcagtacaattttaaataaattaccattcatagggctgcccgtgattcccgcataaaagacaatggcgggaaagagagatggatggtggagtataggggattcgaacccctgaccttctcattgcgaacgagacgctctaccaactgagctaataccccgtggaaaataccggggggaatctattccatccgccgcctgaaagcaagaggaattcgtcaggcaacgcaaataagatggaagatttcgtgttccttttccgcatgccgccgtttcctgtccggcggaagtctgccgcagggggggagattcatttttccggaaagggccgggaggcggcgcaatacgggaaccgggaaaaggaatgcctgtatttccgtagaaagcggacggcagttcaaagagcggtgaatttgatgttccggactctggcaaaggcacgtttcaagcgggaggaaagccattttccgcatggttgttcaatgccgtaatgcatggcggctcccacggcaatcaacaggagcgcggcgcatatccagaagaggatgggacgggttccgtaccggtcctgcggccagatgtactgcatgaattgcaggaggggaacatgcagcaggaagacggcataggtcaggaggctggcccggttggtcaaatggatgagcaccgctggaattttaacagccggcggctgaggggattttgcaagtgagcacgcgctggcgatggtcagcacggcaatcagcgtgtcgggaaggaggaaggccagggaggcaactttcccgccggagccccacaaggcgccgatgaaagtctggtagagaaggtagagcaccccgaaggagaacacagccgggctccaccggaagaagcgttcgtgttttttatagagccgtgccgcgcagcagccggcgagaaattgccataaacggtagggcgggaagaagtaaaggcgtgcgacgggttccaggaacgtgcaggcgacagcggttacaaggcccagtgccagcagcaggggaaggcgtttccttccataggccacgagagggaagataaggacgaagaggatttccagcttcatgtaccataaggcataattgtctcccgtgtgcaggttcatgaattgattgccgccgaaggaaaccagcaggacgccgagcaggttgtccagctggaattgctccttgtaggagaccaggctggacaggaggatggccgtgaacaggagcggccacagccgcgcaaatttggagatgtagaaggagggcggactgaacgaattttctttcagggtgaacgtcatcaggaatccggagaggacgatgaaccagtccacgcccacggagcccgcaacgggcgaccagcgcgcccagtggaaggcgcagatcatcaggcagaggatgatgcggattaatgagatgcctgtaatgaaggaggaaggggcgctcattggaactggggcatcagcgatcccgcttgtttttaatgcggctcctgaggtgggcttcttcaaaaaggccctccatgtacagccccacggcctgcgcttttctgaggctttgggctgcattcctcagggccggaagcgcttcttcgtaggaagggatacttccttttttgaggggggaggcttccacaaggtgccatccccaccggcttttaagaagcaccggcttgttgtcgggaacgtttgccagctccaggcccagggtttcccgtgcgcgggcggggctgacccagccaagttccccgcctgcgggcgcggagcgctcgtcctcactgaattccctggcaagccgggagaaggtttccccgccttgcaggcgcgccagcagcgtttccgccgcctgtttgacctgggtttcatcgttgtgaagggtagccaggaagatgtgcctggttttccggaggtcaggggttttaagctggtcccggatcaaatcataataggttttcaggtcttcgtcggacggctctgccgcctgggcggtcgcccggtagagctgttccgtctgcttgagccgcgccgctattttttcctggaattgctgctgcgtgaatttctggtcatgcagggttttcaggtattgttccgtgttcccgtcaaagcgggaacggatttgttccgcggcgtgcgcggcttccgcattgcggttgggaagctgaaggtcgttgacgctggttttcaggcgcaggagggaggagccgatcagatcgtacctggcccgcggagccaggtctccggctacgtccagttcatgggtgagcctgatgcctccgtccatgtccagaacgggaggctggcgcaggagccggagttccgcaaccctccgggagagctggttggcggtgacgggttcgccgtaaacttccgcaatccgggcggagttgtctccgggcggtcccggcatcggtttcaggtaggcgtccatcctgccggccaggaagccgtgccagagaaacaaatcccccaccagatagagcaggaatgctccatagatcacgagcttgaacgtggattttccagtgggggacatgggagggacagggaaggagcaaagggcctagtttccaccgccggagtctgccagacggacggattccgggggaaggaagttgcggaacctcttcttttcaatgcacttcatgtaggcttcctccggagagacgacgccctgctggagtttttgccagatggcgtcatccatgaattgcatgcccatggcctttccgccgacgatgacgtcagggattttctgcgtggcgccttcacggatgatggccgccacggcgggcgtggcaaagaggatttcattgacggctacgcgtcccggcttgtcgctgcgcttcatcaggagctgcgccacgacgccgcggagggagcccgcaagcatggtgcgtacctgggactgctggtcggacgggaatacgtcaatgatacggtcaatggttttgctggcgttgttcgtgtgcagggtgccgaataccagaaggccggtttcagccgccgtgagtgccagggagatggtttccaggtcgcgcatttcacccaccagcacgatgtcggagtcttcacggagggaagcccgcaggccgtctgcgaaggagggtgtctggaggggcacttccctctgggtgacgatggattttttattggggtgaacgaattcgataggttcctccaccgtgatgatgtgccgcgcctggttgctgttgatgtagtcaatgatggcggccagggtggtggatttaccggagcccgtgggccccgtgaccagcaccagccctgatctcatgtgggcgaattccttgacgaccgtgggcacgcccagttcttccagcgtggcgatttttgtgggaatgagacggaagacggctcccaggccgtgctgctgcctgaagtagttgcagcggaaacgggaggtttcatccatttcataggcgaagtccagatccccttcttccaggtatttctggaaggcctgggagtcgcatatttccgcgagaaggtttttgaacgactggccttccaggttttcgtcggagatggcggagatggtcccgttgacgcggattttcggaggctggccttcgctgaggtgaaggtcggagccgcccgcttctacgaggtatttgaagtattggtcgataacagccataacaggagtgtgtcaaagttaaaggttacttgattcccaggaaggatttcatgatggttttgtcttccgcgcggaagatgcagtcttccgtggtgatgagacctgcctggtgcagcgcccggagggagtcatccatcaggatcatgccctgggccttcccggtctggatgcagccgggaatcatgaatgtctttccttcgcggatgcagttggcgatggcgggtgtattgaccagcatttcaatggccagggcgcggccgttgccgtccgccctgggaacgagctgctgggagatgatgccgcgcagggattcactgaccatgatgcggatctggtcgcgctgctccaccgggaagacgtccagcacgcggtccaccgtgcgggctgcggaccccgtgtgcagggtgccgagcaccaggtggccggtttcagccgccgtgagcgccagggagatggtttccaggtcgcgcatttcacctaccatgatgacgtccgggtcttcacggagggccccgcggagggcgcgcgcgaaggattccgtgtgcttgtgcacttcacgctggttgacgtggcagtttttggagggaatcaggtattcgatggggtcttcaagcgtgatgatgtggtcgtggcggtcctggttgatgaagtccacgatggaggccagggtggtggatttaccggaacccacggagcccgtcaccagaatgaggccgttggtgtagcgggtgaggggcaccacgtattccgtcggcaggccgatttcctccatggtgcgcacccgcgtgttgatgatgcggaagcagatgtcatagcccaggcgctgcttgaccacggaagcgcggtagcgtccgaagtcgttggcataggcaaagtccacgtccccctttaattgaaggcggttccattccgggtcttccagaaagcccctcgccagaacttccgtgtcctggggcgtgagattgggcgcttcctcccagatggggagaagctggccgaaccggcgccaggtggggcggctgttgacggcaaggtggatatcggaacagtcaaagtcctgtccaagcttaagatatccgtcgacgtggggcaaaatgtattcgctcatgttgtgaatgcagcaaactgataaagctacatactaacgaaaacggggcttttttgaccagcaaaaaatgtttgggaaatgatttctgtgcaggcggccctgtgccgtcccgtggcgggggaggatttttggagagaagccttgaggaaggctcgcaaaagtttatttccgggagcgggaaagagcatttatgtttttctgccgtttcgggaaccggatcctgagggatcgcggtttttcacggactttcccggcagaggcatacgtttggcatggcggaaagagccgacagcaatcccgctgctgttttcatggttaaatgtgaaatggcggcattgaggacaagtctatggcgcggttgcatttttgcctccgggggaaaggtcgggatattgttttaaatgactttcttcatcaatttttcctgttcctccgaacggggacacggaaggaacatttccaaattccccgccgccgcgatgactgggaaggccatgtttccgccatgatggtcgtcttcctatattggggcctccctttcatggccaggtagcttttttcctgattgtgccctgttatttttggcaggaattgttcatggcggaaagcgctggaaaggggaattgagctgccgatgcctttttggggtcaggcatgccctggtctcctgtttcattccaatatcgccgcatggaccatgccgaaatgcctgtccagcctggcgaggtacgtatgaacaaaggggcgttgttttctttggcggcaggtcgttattttatgaggtatcgcggccgtctgcatgaagagttgtcctgcagggggggacgatattcccggaacggcgcgcatctgacgccgcagggatatgaagacatttctcccgcaacagcggaattcctgagttcttttttaaagcagcggcttgaaaaggctgcgccgcatcgaccggaaaatcctgttacttgaacaggttgaagaatttcttgcctgccaggtcgaagcccatttttttcagggacgggaaggcgagggttaccaggatttcaatgatgaaacggaagataggggaattgatccagcttccggaaacatgcggacgcgggggcgccggatggcttttttttcccgtaaacatgcggatgagcagaatgcctcccaccgtgccgacaatggagccgatcacaggcagggacatggccttttttttcagcttccggaagtggtcggcctgctgctgcgtcttctggaccagggtatccgtctcattgacgatatccagccgggaggaagccacccgcatcaggagtgcgagcttttcttgagagccatttgcagacatgataaatccgttttaagttcttccgccgtcgccggggcgatgggcgttacatgggttcggctgaaaaggatgagggccacggcagccgccaccagatggatgccggtggttacggcaagtccggcaatgattccccagaagtgggccatgaccatggtcaggaagcaccacaggaacagatagccgaagatggccataaaggcggccagcaggagcagggccattttcctgcccagccttttggacgcttcctccagttccagcttgagcagcgcggccagggcttccacatggtcaagcgccgccgctccggtttcccggagggaccggaccatagccgctccttcttccttttcctccacaatgggggcgacgaaggtgcgtttgagtttgtcaatcagtcccatggctcggtttgaaggggtgagggcgccatgcgcttgatgcgcatggcgcggaatgagggttaacggcggcggatgagcatgccgatcagaaggcccacgcccatggcgatcagcacggactgggtgggtttttccttcacgtattcttcgcccgcttcatggaacttcttggccttgtcacggatgacttctcctttttcctgggcgtagtcacggatggtgctggcctgttccgtagccgccttgcggatttggtttactttggccgcggcgaaggccctggcctgttgaaatctggttacggcaagctcgcgggcggaagggcaggagcaggcggtgtcgtttgctgctgcggtcggttcaagttcggtttggttgtcttgcatggttgattagagtgttaagggttggttcctgttgaaaaacatgtcggcttacatgttttcgcctctcacattgggaattatttagcacgcttccctctattggcaagtgtgtaaagcggcttcacccggaattgtgcgcgttcctcagcggcggcttcctgaaaaaccgccgcgggggtctggtttggcctggggctcgttcgggttccggtaccgcaggattccgtagtccctcaggttacggatgaattcctgggcattggcgcggaagcgcgcatcgtacatgagcagccccaggaagccctggtttttccgggcgtccgccgtgacggaggcgatttgctcggaagccttgcgcagggcggtcagcgtgggggggatttccttgatggcggggtccaggctgttgagcttttcttccgctccggcgatgattctgcgggcgtcactgacggtgtctttcatggccgccattgtcgcggggagctgttcgcccgctttgttcatttgagccagcacgctgttgaggtgccggaggttttcccggctcaggatgccttcattgatcagcttggtggtctgggccagccctttggccgcttccccgatgttgaggatggcctcgtcaatgttgtccgaatttttttcaatctgcttgaggattttcagtatttcctccgtggcgcccacggcgttgttcttgatcttgctgaaatcgctttcaggctgcccgatgatggtggcatggggcgggatgtattcgtgcgtggggcgtgccgggggaacgatgtcgatgtacttgtctcccaggatgttctgcatgtccacgcggaagacggagccttcctggattttcacgtcgctcaggatgctggcttccagcatgacttcattgccggagggcaggagttcgggcgccttggtgacctttcccaccgtaacgccgcccaggcggagctgggagtccttgatgaggcccgccgcgtccttgaaaatgatgttgatggggtaggtttgctccttggaggtcttgatgttgccaaaccccaggatgacgccgatgatcatcaggattccggcaatcaggaagatgcccacccaggtttccggcttaagtttctgcttcatggctctgtggtaagatggttattgtttccgttcacgttccgcccgttccagcagaacccgttgaaagttttcatgcctgccggtcagggaggcccagtcttccccggaatccccgtacaggaacctttgcaggttttcatccctggaatgcagcagttcctccggggttcccgtccagtaaacttccccgttcctgagatagacgattttgtccgcaatgcggatcacgctgggcatgtcatgggagacgatgacggtcgtgattcccttgtccttgcagatttgccggatgaggaagctgatgctgtccgtgacaatggggtccaggcctgcggtgggctcgtcatacagcaggcattccggcgtggtgacgatggccctggctacggctacgcgcttgatcatgcctccggagaggctggccggcattttttcctgctgccccagcaggtccacggagtccagggcggcggagatgcgcgcgtccagctccttttcattccggattccttcctcgcgcagcgggaaggcgacgttttcccctacgctgagggagtcgaagagtgccccctgctggaacatgaagcctattttaccgcggatttgcttcttgattttttccggcgctccgctgatgcgcctgccgtctatttccacatagccgtccagcgggtccatcaggccgtccagatgtttcaggatgacgctttttccggctcctgacccgccgatcagagccatcagctctccctttcccacgtcaaagctcacgcctttcagcacttcctgggtgccgaagctttgcttgagctggtggacgcggatgaatggctgcatggcggcgcggaagggttatctcatgaatcccatggggaagatggaattgagaatcatggtcagaatgaagttggcgatgagcagagccacggaggcatacaccatggcctgcatggtggatttgccgacgccaacggctccgttcgtggtgttcaggccttcccggcaggagatggtggagatgatgaggccgaagaccagggctttgaccagggccacggtgatgtcccccatggtgacgaatttgctcatgaagtgcatccagtaagcctggtccacgttaaaggaggtgatactgacgatgtaggcggaggcgatgcccaccagcacggcttccatcatcaggataggcatggaaatgagcatggcctggatgcggggcttcaccaggtagtccaccgggtccacgttcatggagttaagggcgtctacctgttccgtgactttcatggtcccgatttccgctgccatggcggacccgacgcggcccgcaagcatcagcccggtaatgacgggccccagttcccggaacatgcccacggcgacgacggcgccccccatggtttccatcctcaccgtctggagctggaacagggtctgggcttccagcacggctccggtgaacgcgccggtgatgatgaccaccggctgggactgcaccccgatttttgcaatttgctccacaagaacgcgcatccgggatttgccggaccacatgcatgcggtcacttggtaaagcagcaatccgattgaccccaggcggtcaaccagccttagagcggcgcggccgatcatggtggctacatagaattgcatggcttctactaatcacttcttccacttcaagagcaagcgcaatgtacgccacgggaagaaaagcaacgcgccgcgtcaatccgtcagccggtggacgtaaggcgtttccggtgcaccgggaatggagcgcagcgtgaggcgcggcggcagtttccggcgcatccattcggaggcgcgggcccggcgctgccagcggcggatttcaagctccgattccgggaagaggccagccagcggcgtggcggattcatgcgcgcggtgcagacggatgaggaggctgtcgcgcatggccgcatccggcgcgggagaaaggaagccggggaacaggtccgccagttccgtttcatataaatcccccagcggcatgaagtcagcggccagggccggcggaaggaggcggggtgcggtcatgatgtccgttccggtcagggcggaaagcagcaggccaccttcctcctgggcccattggcgcatgagccatgcggccgtgaacaggtcatccggtcctccggccgccgcatctgcggggagaggcagcatccgggcctgaatgcccagcttgtccgcacaggcttgcgcccgggcagtgtcctgttccggaatgccggggaggcgggggatgaagcccgtcaagggcagggaaggcagttcctcttttaacagttgagccagcaggagggatgcggagctttccagcaggttcaggcaggcggcgccatgcccgcttttcaggatgaagtccgccgtgcctttccggagggcgtgccggagctgttcttccggagcgggaagcggagaagacgcctccgtgggattttccggagaaatgacggcagaatcccgttcaaaaagacgcagccgtttgaggagaatcccgtgggcggaccatgcggaagacgcgccgggtaacagaaacgggccttctcccccggccaggcgggcggtgaggaccggcagccctgtttcccgcgccagccggcaggcttcctcctcatcctgctccagcagtccttcatgccacgcgccggaatgggtgcggagcaagaggcagggtacggaagaggaggccggggaagattccggccatgaaatgatggaaaaacccgcttcatccgccgtccggcagatgccgaaaacgggaacggccaccgttccgtgtgcggctggggaaataacggcttgccgtggaaaggaaaggccgttccggagcatgtggaagcggctgccgtccgcgtccgccgctgccagcagcagggggacgtccgctatttcccgggccaggtaggccagggccgccctgtgctgggaccggaagccgctgcgcagggccagttccccggtgtgcgcgccactgagggccagcggcggacaaagaacgagctccgccccgccgtccacgcaggaacggtacagttccacgatggttctgaggttcctggggaaatggccggggatggtctccggctggattaatcctgtcttcagcatgcgccggcagggtagaccattccggggaggcgggcaagccgggatgcccggcggctttccctccgggcgtttcctgaggagtttttatcgcaaggagcttgtcatccgcggtcttcatggtatgatctgcaccgattgcgcgccgtccgttcccgggcgcatcaatccggaattacttatgaggaaacagtcaacagaggggcaggaatcctccatccagcgtgccgtagcattatggcgcgaatatcttcttccttataagggcacgctggtgtgggctgtgatcggcggcatggtggccgctgtttccagcggcttcggcataccggtgattttgcaggaaatgttccccgtgatctttgacgggaagccgctgcccccgtgggcggagcgcgtgctcctttggtacgtgagtccggaaaacctgccctgggtgacggtgtgggccacggcggccatgctcccgatggtagtggtggtgcgcggcctctcctccttcgtcaatgtctacctgctttccaaaatagggctgggcgtgctggaaacgctgcggctcaaggtgtacagaaaataccaggatttatccctggcctttcatgaccgccagcagaagggagacctgctgagccgcctgatgcaggacacgcagttcctgcagggcggcctggtgcagattgccaatgacctgattatccagcccctgaccctcctggccgcgctgggattcctgatttacagggcttccgtcagccagcagttccttattttgctggcgaacatgcttctggtgggcgtctgcgtgattcccatccgctacatcggcaagaaaatgctcgcccgcgcccgcgtggtgcagtccagccagggggatctttcctccacgcttcaggaaaacttttcctcccagcgggacatccgggcctttgaactggaagagcagcagacaagtctgttcaggaacaggattcaccgttacatccaggcttccatcagtgcggtcaggtggcagagcctgctgacgcctttgattgaattcgtcagcgccatcgccatggcggccactctctttgtcggcaacatgaacggcatgaacatgggggacttcgccgcgctggctacggccatgtacctttgctatgaaccggtcaagaagctgggggcggtccacaacaaggcggaaaccctgaatgccgggctggagcgcatcaaccatgtgctggacgctccggacgacgttccggaaccggaaaacccgaagagtccggaaacctggaagggggaagtggagttcagcaatgtgtgcttcggctaccagcaggacgcccccgtcatgaagaacattgacatccgcatcccggctggccaggtggtggccctggtaggccccagcggcgccgggaaaacgaccttcatcaatctgctgtgccgtttttacgacgtactttccggcagcgtgaaggtggacggcatcgacgtgcgggagatggccaagaaggacctgctttcccatatcgcgctggtttcccagtatcccgtgctgttccgcggatccgtggcggacaatatccgcatcggccgtccggacgcttccgacgcggaggtggaggaagccgggcgcatgtccgccgtggacagcttcatcaatgagacgggggaaggctattcccgcatgatcggagaaatgggggaagggctttccggcggccagcggcagcgcgtttccctggcgagggcctttctgaaaaacgcgcctatcctggtgctggatgaagccacggcttccctggacatgaagagcgaggaactcatccagaaggagattgaaaagctggcttccggacgcacggccttcatcattgcccaccggttcagcaccatccggatggcggaccgaattctggttctggaaaaagggagcgtcattgcggatggcacgcatgaggagctgatggcctcctcccccctgtacagggaactttacaacaagcagcagatggttgcggaagaggaaggaggcgcttcatgttaagacagttttttgagtacgcgcggtatttgaagccggtgatgaagctgttcatcgccgcgctggccgccggggcgctggccgccgccgccagcggtttcggcttcccgctgatgattgccaaggtgttcccggtggtgtttgacaatacgcagattcccccggagcttcagaacatcatcgcccatctggtggccccggagcacatgcacaccgctgtgctcgtggccgtatgttccctgctgccgctggtttttgccatccggggcataggcacgttcttcaatgtgtactggatcagcatcgtcagcatgaaggtgctggaggaaatcaggctggacgccttttccaaactgcaaacgctgcccctctccttcattgaccgccagaaacggggggacctgatcagccgcctcattaatgacgcggccaacgtgcagggaggcctggtaatagcggccaatgacatcatcaaacagccccttaccctgctgaccgcactcgccttcctggtgtacaaggtctttgttgacccgaacacggcggtggtgctgatgaatctggggctggttgtgctggcgatatggcccatccgcttctttggccgccgcgtgatgaagaaggccaagcaggcgcaggacgagctgggcaatatcacggccgccgcccaggaaaacctggcggcccagcgtgaaatccgttcctacggcatgcaggaacagcaggtggggcttttcctggggctgatccaacgcttcttcaaaatcaatctgagaacggtgaagtacaggcacttcctggtgccggtgctggaaatggtgacggcgctgggcctgggcattctgctggtgaggggccatgaaatgggaatcaccaaggctgacttcacggccctggccgctgccctcttcatgtgttacgaccccctcaagcgcctgggcgtgacgctgaccaacctgaaaagcgcgcatgcctccctggaacgcatcaactacctgctgaaggagccggacaccatgccggaagccgccaatcccgttcccctggggcgagcctccgggcgtttggactatgacggcgtttccttctcctacgacggcgcccgcaaggtgctggacggcattgacgttcatatcagccccggggaagtggtgggcctggtaggccccagcggcgccgggaaaaccacgtttgccagccttctgcccagattttacgacgtcagttccggcaccctgcgcatggacggcgtggatgtgagagacgcctccctgcacgatgtgcgcaagaacattgccttcgtttcccagcatcccgtgctcttccacggcaccatcatggaaaacatccggctgggacggcaggacgccacggatgaggaagtgatggcggcggcgcgcgccgccgccgcggacggcttcatcatggggatgccggacggctaccagaccatgcttggcgacggcggcagcggcctgtccggcggccagcgccagcgcgtggcgattgcccgcgccttcctgaaagacgcccccgtcctgattctggatgaagccaccgcctccctggacgcggaaagcgaggcccagatccagcaggagctggaccgcctggtggagggaaggacggctctcatcgtagcccaccgcttcagctccatccgcgtggcgacgcgcattctggtgtttgagggcggccgcatcatcggggacggcactcatgcggaactttatgcctcctgcccgctgtaccgggaattgtatgaccgccagtccctctaggtgaaagggggggacggagacggaaggcttttcccgcgcccgtgccggagcgcacatggcggtttttctcaggccatggtggaaagagctattgtcaaacaagggtcatgatgtactattccgccagcatgaatacactggatgaatccctgacgaatgccgttaaagagggggagcttttggagtcttccctgaccaatatccgccttctgctggccggaaccaaatcccccgtagcgcgtgaggccgtagaggaactggccgccgccggggagtggcaggaattgaatgaccgtttttacaagaccctggccttcggtacgggggggctgcgcggccgcaccatcggcagcatcgtgacccgggcggagcaggggagcggcggcgtgaacggccgcccggaatatccctgcgtgggaaccgcctgcatgaactacttcaatgtggggcgagcgatgcgcggcctgatcatttacgtgaaaaagcatgtggaggccacggacccgggcaggaagccccggctggtcatcggccatgacacgcgccacttctcccgtgacttcgccgaattctgcgcgaaaatcggcacggacctgggctgtgacatttacctgttcgacagcccccgggccacccctgaagtttccttcgccatccgtgaactcaatgcggattccggcgtggtgctgaccgccagccacaacccctcccacgacaacggcttcaaggcctattttaacgacggagcccaactggtgcctccgcatgacaaggccgtgattgaggaagtgaactccctgacctctgaggaatatgaaccgctgccggaagaccggcgcggcacccttcacgtgctggacgcctcctttgaccgcgtctacatggaccgcctgaaaaccgtgctgctccgtccggagctcttcagcaagggcggcgccaaaatcgtttactccaacctccacggcacgggcggccatatcatcgttcccctgctgaaggaactgggctgcaacgtgcagaccgtggcggcgcaggacgtgcaggacggccgcttcccgacggtggcctcccccaacccggaaaacccgccggccctggccctggccattgagcaggcggacgcttccggcgcggacatcgtcatcgccacggacccggacgcggaccgcatgggtgtggccgttcgtggggaagatgggaaaatgcacctgctgaccggcaaccagatcggctccctgctggcgtggtaccgctgcatgagcatgtccgggctgggcatcatcaatgactccaaccgttcccgcgccgtgatggtgaaaacctttgtgacgacgggccttcaggacgccatcggccaccacttcggctatgaagtggtcaacgtgctcacgggcttcaagtacatcgcccagaagctcggcaaatatgaagaagccattcctgcggaaaagcgggaaggctaccggaagatgagcgaggaacagacgcgcgccctgcgcctggaatacagccgctactttgtcttcggcggggaggaaagctacggctacctggcccaggacttcgtgcgcgacaaggacgccaactccgccgccatcatctttgcggagctggccgcctatgcggaaagcgtcggcaagagcctgctggaactgctgcatgaactctttgaacaattcggcgtgtacctggaaatgggcaaatccctggtcatggaaggcgcggacggcgcggcaaaaatcgccgccctctccgcctcctattcctccaatcctcccacggaagtggacggcgtggccgtcagcggcatccgggacttctccaagggtgacatggtggatgcggagggcgaccccattccggcggaaaaaatgatctttgtggatatggcggacggccgcagctttgcggtgcgcccctccggaacggaacccaagatcaagtactacctcttcggccacgggaaaccgggcgctccggtgaaggaagccctgccggcggtccaggcctccctggactccctgtgggctgccgtggagaaggacgccttcgcccgttccaacggctaaatgttgttgatttctttcccccgtctaccatgtaatgtggacgggggaaatttattttcttgccaaggaggccggaattccgcagtttataattcttatgacatttgcggtccacaaaactctctccgtggccggtgctcttttggccggtcttcttctctcctcctgctcctccacctcccaacaagtcgaagctccggcacggctccccgcctaccactttgtaccgggaaaaacggccgtgctgcacaacgggaaggccattccccccaggaatgcccccccgcaggtcaagcgcgccattgcggccgccaattccctggtcaacaagccctaccgcctgggcggcggccacaggaagcactatgactcccactatgactgctccggcagcacctcctttgtactgaaggaagccggcctgctcacttccacccgccattccaagctgttcctgaactacgggcagaaaggcgccggggactggatttccgtctatgccaagaacgggcacgtattcatggtcatctgcggcctccggtttgacaccaccggaagcggccgccgcggcgaaggcccccgctggagggtggacggccgcaatgcccggaacttcctggtgcgccaccccacgggtctctgatccgggcctgcgcgacggaaaaccgcgttttttgcgtatgttcgcgcaggctttcttgaacaatggaaagtaatgtgctatcaggtgcgaggacgttgatagttccttgactttcatggctaagacaaaaattcacgtagggcttgagatagggacaagcaagacttgcatggttgtgggcgaagtgaagcccgacgcaaccgtgacgatcatcggcgtgggtgaggttcctagcgagggcgtggtccgcggcgagattgaagacacctccaaggtcatccagtgcatttacgatgcctggaacatggcccaggaccatgcggacgtggacatcatgaccgtctatctgtccgtgactggagcccacatcgtggggcagaacaaccgcggaaccttccgcctgcctccggatgaaagcatcatttcccaggagcacatggacgaggtgacggaaatcgcccgtgacatcgccctggggccggaacaattcgtcctgcaccgcgtgcccggccttttctccgtggacgggcaggaaaacctgaccaatcccgccgggctgaccggcaggaccctggacatcgactgccatatcatccacggcatcaaatcccgcatcaccaactccttccgctgtgtgcgggaagttcccctggacatcgcggacgtggtcttcgccccgattgccacggcccagttcgtgctcaacaggcaggtcaagcaggcgggagccctcctcattgacatgggggcgggcactacggattacgttctttacctggacggccagctcgtggcctccggatgcgtgcccctgggcggcgaccacatttccaatgacatcacgctgatgaccggcattccgctggcacaggcggaactgctcaagaagacggagggggatgccaacagcttttccggaaagaccaatgaaatggtgcgcgtgcgcggggaaggaaacatgaaggatgccgccatcgaacgcaatgttctgaatgaaatcatccgttcccgcctgctggaaatcttcaatctggtcaaatcctccctgcccaaggacaccttcaagggcaaccgctgccacggcgtctacctgtgcgggggcgccagcctgatgcgcggcgtgggggaactggcctcccacgtgttcggcgtggcgatcagccgtcccacgctggtcaaaaacggagcgccttcctatctggatgacccgcgttactgtacggccatcgggctgatacggtatgcccagattctggatgccgaactgccgcagcagcggagctggctggggcgcgtgctgggcctcttcggcaggaagaactcctgatcaatctctaccccaattaaaaaccatgctggaattttctccccaggacccgtccgggctatccggaaaaatctgcctgtgcggcattggagccgcaggcgccaaggtgatggaggaagttctgctgctggctccgcaggcggtttccgtgtgcgccatgaatctggatgcccgtttgctgaacgcctccgccgttccgtgcaaggtccatctgggagccaggcttacccgggggctcggctccggcggggatgcctccgtgggggcacaggccgcctgtgaaagtgaatcctccatcctccgggctctggaaggcagtgcgctgaccgtcctcgccgccgggctgggaggcggaacaggctccggcgtggcgccggaggtggcgcggctggccaaggagcagggctcctacgtcgtcagcgtcgtcatccgccccttccggtttgaaggagaccgacgcgccgcccaggcggacgaggcgctgtcccggctggccctgtattccgacatggtgctgcggtttgacaatgacgccatggaaagcctgattgatcccgacaagggagtgttggaagccttttccgtggtcaatgccctcattgcccgcgccgtgctcatcgtgccctcccttctcaactcttccggaagcctgctccgcgtggggctggatgacctgctccgcgtggccggaacagggaagggaatttgctccttcggcgtaggggaagcgtccgcggacgtttccacggcggacatgctggaccaggtccggcactctccccttttcctggaaaaacggctgggggaagtggacgacgttctggtgctggtgcgcggcggcaattccctgaccctgaaacgcctggaagcgctggctggcggagtggcggaaatcctggggagcggcgtgcgcctccatatcggcgcttccgtggcggaacagccggaagaccgcctgtccctgaccgtgctgggcgttgtgcccgtgaatgaaccggaaatttctcctgcacccgttttccgtagggaaccggagctccagacagttcttgtgccggaggaagaacccttcatcggggatgggaaaaccatcattcagcctgtggctcccgccgtggttcccgaaccggaacggcgtccggagccggaacctcccgtttccattccctccgtcagaagggatgaccatgaactggaagaggaactggtgcctgtaaggcctgttccctccgtgccggacgtggaggaaacgttcccggaacccgcgcctgcggcgcaggaacccggagcggatgcggaacaggaattggacccggttcccgacatcaaggaactggaagaaggaactcccccggaagaaggagaggaagagcgcgcgggacacggactctttgcccatgtacgccccctcattctggacggggaagacctggacctgcccccggcgctgcggaagaagaaaccggatccgagctgatgccgtctccccgtacgtccagggtatggttttgggcgctggttgcagccgccctgctgtatgtggcgttgcttagctggtggagccccttcacctcagacacgtaccatcacgctctgacgggcatggaacaccgtttctccctcagcctggtctgggaacgctgcgtggcctcctacatgagctggaaccccagaatcggggaatacctggcctttgccgtggcgacggcgggcaaatggctcttcattctgctcaacccctttgtacaggtctgcctcgcgctgatgatgttctatctggcctccgggcgcagggtagacccccgttcctggccggacgtgcgactcttcggattggcgcttctcctgctcttcacctgtacggcccggcccggcgtcacgatttactggctctccggcgctaccaactattcctggggagccgccctctggctcggtttcctgtgcctgtaccggggattgctggaaaatcgggaaaacggggaaaaaggaaagcctgctaaaaagggtttcgggcagtgggctggcgtagtggtactgggattgttggcaggcatgactaatgaaaacaacattccgggaacctggcttctgctgggagccttgtttgtcttcgtccgcctggtccggaaggaaaaacttcccttgtggttttatgcgggcgttgcggcgcaggtagcaggttctctgtgcatgttgcttgcgcccggcctctctgcgcggatgcactccgccactcccggctgcgcggaacccctctccggcgtttgggacagatgggaagcggtccccgcgctcctgctccggatgcatgaatacctggtccttcccctgctgttgggtgcggtggctgcctggatgctgtggagaagcttccgcaggaaccggaatgccttccggccatggaaaattttcatcggaacagcggcagcatacattctgacggcgtatgccatggctctttcctttgccgccgccgtcgttccggcggaccatgccatgttctccgccaccctgctgttcggcattggcgttttggctcttctccgtgtgtggtacggcattcccgccgcggagccccgtccgcggatgactgtggctgtttttctggcgctgtccggaatatgcgttctttccacccttcacgatcacctgcttctgttccggcagcatgaaaagcgcgtccgcctgattctggaacagaaaaaggccggttttcgggaaattgtggttcctcccctcgttccaccctccccgtggtgctccttcatcttctgggtggacctgtcgcaaaacccggaagactacgtcaaccggggcgcggctgtgtattatggagttaggaaaatttttattgaaaaattagaaaattaaataataataaagaatatgaaatattttcttggttcatcagcaattcaaaaattgtgggaatatgggatgatatttctgctgtgcgtgctctgtatcaatgttcctcttcatgcagaagatgaggaggaatgctggaatgattctttgttgaagattataacaaaaacagaacagccttctgcggaattcgtcctgaatattcaccgggatgaagaaaaggcttatgaaagaaaagaggtcggaattggagaaagattcaagttgatattatcaggcaagcttgtcgaggggcaaaatgcccagaacgtaaaaaatattaagtggcaccttctaagtggccaagagtatttgaaagaatggccaaaaaatactgatggaaggtcaaccttgaatgtagaagcaaaaaaagaatttctgaaagattcattagatgaaaaagggaaaaagaaagacggtaaggttgtgattcaggcagaattaaatgggaaaaggacaaaaaagttggagatagaggttctctttcctgaaaaaatgtggagcaagcatgcccaaggaggagttcctgcctcttttcaggatgagttgacgatgggagcttccatgttattagaattaagattggagccattgaaggtgagctttgttgaaatagatgtgattgaaagggacttgggctctttcaaggatcaaggaagtataagtgaaagcatagatccaaggcatacgcctgcaacaggctgtgatgcgaaaatagatgttttgcccggcaataaattttgggatagagctacatcaagtgtggatgtccgttttgtaatagagattaatggagttcctcctctgcataagttgcctcaaaagtggcattgggcatgtcaatggagagttcattatggaggaggaggattggacagtaaaaataaggacggtgcagtaatcgtagaagaaaatcaatgttttgtatttgaaaaattagctcttgctaatgggcattcttatctaaattcttctataaagaaatttggctgttttgtaacaaggaatacattgaatttgagatatttttttggtcctgaaaataaaaaataacagaatgaaaaattatttaagcatcataggtatttttctcctcgcgtctgtcatgaatgttaatgcagcgcaagtgataataattaaagctccggatgttatccctattttcaaggaggaaccggaattggtccagggatgggcgcagttgctgagagatggaaaattgaaggaattttatcagaaggtccataagtctcaggaatttattgagaaaatggattgggatgaattgaaagaaggagatctcaataaatttttatggatatgttattatgtcgccaaagctcctgcttttcaggtcgattatgatgaaaatacagattctaccaaccatgaaggtttggattacagagaaagagacaatttggctggtgaagtggtaagaatgtgctggagcctgccggaaattgtttctcagcatgacctgaaaagaaaagaactggcagaattattatctttgtatactgctgcaatgaccaaaactgtacgtgatgattatgatgaaaagctatctgagaaacatgcaaagatggctggagaatatgaaaaaatagtacagaaacggttaaaagagtatgcagagaagcataggggagatggagtttggggttctggtgatattgaaaaaaagcgtatatattattataataaaatagcttccaatgaagttagaaattattcagcttcccattatctcaaaaattcacttgagccggcattaatgaaaattttattgaaatgttttccgggcgataaaaatgaggtggaaaaatatcttaaactggcaggatatgaaggaaaggcgatggacgaattgatcaatcgaactgtagggagggatgcaagcactaaattcctatacaagggtgatcgaggacgcagatatgaacaggcgctccggcaacagactggaaagaagaaataaattatagttatttttgaaaagaaaactatgagttttgctaatgagtagtgaataggcaaagatcatagtggtttcctaagagatcagggcagaatataaggatggaggaacggtgacaaagaggtttccggaaggtgcgaccaccgttataggagcttccgctatgtcaaaattattgagagggacaaaagggaggagccttccgatacggatttcgactcaggttattccaagaatggtgcgaatgaagtcatagaagtatttgcaacgaatcaattgtaggataatgtcacgggggggggatttttgccgtcgacttggaacattcccatttccccaagcgtgggactgggtgtgttcctggtgtgcatccatgatgggaggagggagaggactcggaaagccttgatggccacgagatcgtgaaagcgcgatgccatttttgttttgcggatttttaaaggcgggaaatttgaggaccacagtggtaccatatcgtgatgattaccaaatttggctgctgtgtggcaacatggattatgaattgaagaccagagtggtgaggcgaatgaacggtttagccttggatatatctggaattgtcactcgatgccgtgtgaaaagaagtgatttgaccgggatatggagcgactgtgttagaaacattccgggagcggtatgatccggaattgaaccgggaacaggagccttgggctctctactgcaataataagttgatgagcaatgaaaaaagaaacgacagttgcaagtacgaattggaaaagaggttggagcctgcgtttgtggagatgctggttcacttttatccgggccaggccggagaagaggtcaagtatcttaaaaaggccggatacgctgattaggaaatcggaagcctgattgatgaccgtgctgccgggcgtgatggcggaacggaatttttatataagggaggccgcggacaccagcacgatagaaagttggagcctcacggttccgggcgtttggaataatacgcgggaacatgaactatccggaaaagaggaaggcttctatttctttgcgtggacaggagcgtcttcaggcttgcccggaaagcgtggcggactccagtttgttccgggatggaaagaaaaatatgggtaggaagttattcaattcatcggaatcgcgtaagagtgcagttttttgaattcgcttccttgcgggccttggtccgtgatgccgttgttgggggcggcataggtgtccagagtcatggagtccgggtagatgttcaggatgtagtaggccgtgatgccggagcggtattgcagggtttttacgcgggattttgcgggcagaaggaaggggatgggcagcaccttgttgcccgcgggggcgcagatgagggaggtgagggtgtttttcccgtccggggatgtaatcatgtacaggtcgtgggcatgcaggtgcccggtgacgacgaaccgaacgccggcgtcccggaggttacggtaaaagatgttctgctgttccgccgcgctgtcgttgtagcggccccacaggcattcccggaattgcatgggagtttgcagggtgcggtgggtgaaaattaggcaatggcgcggaacggtgttggccttgctcctgttgcgtttgacccacgcgctgaagtctacgagctggtccggggtcaggtcaatgtccatgaagtacagggaggcgtttttatggcggatgccgtagttcagttttctggtggccagccctttggcgccctgtttccgggtaggcaggaagagttccctgaattgttccgcgcggaagggcagcgattcatggttgccgcgcacggcgtagaaggggatgcctttttcctccagcatcttgttgagttccttgcgcttggcgagtccgttgacgggggcgcttccttcaatgtccgccatgtcccccacctggacgaccatgtccacctggtgcttcaggatttccccatagagggttttgatgaaattgacggctaccccttcgcttccttccatgcgtttgggggagtcatgcgtgtcgccgatgatggcgattctccacggagcgggttcctccgcgtgcaccgcttgaaacagaaagatgagaaatagcgcaagatatttcatggcaccccgtttttaccgcccgcctgctttccaggccagaaaattatgcatgcgccggaagaaggccggacgggtgcttctctttttccttttaaaggtggcagttcggggctggtcggaaaagctccacagcagttagaatcatgagagggatactctttttcactggagaaacaggtcctttgacggattttattggcggaggaatgagccattgtgaagactggcttgccgggcctccggaaggttttaccttcttttcagtgaagaggcgtttttctattccggttgccgctgcccggaggggagggccgtcatccccttgcagggaatgcgcttccgttttttcccatcagtgggaaacggagttggaaaagatattgattaccaatactccggcaatgatgagcgccagacctgaaatcgccgccaagtccaggtgctgcttgaatgccacccacccgatggcggagatcagcacaatgcccattcccgaccagatggcatacgcaatgcccacagggatgtttttcagcaccaggctgaggcagtagaaggagcctgcatatccggctacggttatgatggtgggcaggagcctggtaaattgttcgctctgcttcaggaaagaggtggcgattgtttccagaacaatcgccagcaacaggataagatatgctttcatggattcgttcctgataaggcatcgcgccgggaactgccaatgattatgggcatcgtgaagatttgagagagtaaaagccaggcatttgagaagtcaatgcccggcttttgatggagcggatggcttcggccggaggctgctgtcaatggacttgcagggctttggcctgttcttccgtgagttccacgcagtgccagggaaggccgcgcttgttgagttcgtccatgaaggggtccggatcgttctgctccatgttgaagacgccagcgccggaccatttgcccgtaaggatcatttccgcgccgatcatggccggaacccccgtggtgtaggagatggcctgggatccaacttcttcaaagcatttttcatggtcgcagatgttgtagatgtacacggccttgaattggccgtccttggttccggtgatgacgttgccgatgcaggtttttcctttcgtggtcttgcccaggtcccccgggtccggcagcacagccttgaggaattgaagcggaatgatttccactccattgtacatgaccgggtcaatccgggtcatgcccacgttctggagcacttccaggtgcttgaggtagttcggggagaaggacatccagaattgggcccggcggatggtggggatgtgcttgaccaggctttccatttcttcatggtacatgcggtagatttcataggtgcccacttcctgcgggcaggtgaagctccggtgcatgctcatgggggcggtttcccggaaggcgccgtcttcccagtggcggcagggggcagtcacttcccggatgttgatttccgggttgaagttggtggcgaaggccttgccgtgattgccgccgttgacgtcaatgatgtccagcgtatggatttcgtcaaagtggtgcttgagcgcccatgccgtgaagacgttggtgacgccggggtcaaagccggagcccagcagggcaaagagtccggccttgcggaatttgtcctggtacgcccattgccaggagtattcgaatttggctacgtcccggggttcatagttggcggtgtccaggtaattgacgccggtttccaggcaggcgtccatcaggttcaaatcctggtagggaagggccacgttgatcagcagctgcggcttgacttcccggatgagggccacggtggcgggcacgtcgtccgcgttcacggcgtgggtggtgatattgacgtccgttctggcgcgtacatcgtccgcaatggcgtcacatttgcttttcgtgcgggaggccagatgaatgttttgaaagatgtccggcagttgggcgcatttgttggctaccacatgtccgacgccgcctgctccaatgattaaaaccgtgttcatgatatgcccagtacataagtgaaaacagtttgaaaggcaaccccggatttggtgcaataatgacactgccttcccacggtccaaatggccgttcccgtcggctgccggacggcgttttccttgcggaaggcgcggccttttggaaattttccaaaaatgattgaacaagagattgacgctggatgtcggactcttcaatattgaactgtagatatgattagacaaattctgccaatagttgttgccgcctgcgtcgctccctgttttgccgcggaaggatggattaccgatatggatgccgccaagaagcaggccgccgaacagaagaaggacctcatgatcgagttcaccggttccgactggtgcccgccctgcatgcagctccgcgccaacgtgttcagcaagcctgatttccagaaggacgcccagaagaatttcgtgctcgtggagctggattatccgcgcggcaaggaacagtccaaggaaatgaaagccgccaatgacaagcttgcccagcagtacggcgtgcaggggttcccgacgatcgtatttgcggacgcttccggcaagcccttcgggggatttgtgggcggccgttccaaggatgacgtgatgaaggccatgcaggacgccttgaagaacaaggaagccctgaacgccgctgaggcaaatgtagccaaggccaccacggatgaagcgaaggttgccgccctgatggaagtgctcaagctggctccccaggagtatgtggacaatttttacggcgacgtgaaggcggaaatcaagaagctggacaaggatgacaagtccggcttgaaagccgctgacgcgcacgccgaccagcttaagaaggaacagaaggacgtccaggattatcttgccggcaagctgacggacaagaccacgcctgcggaagctctccaggtggtcaaggcttatcccgaccgtgacaagcttctgccggaaacccagcaggatttgctgatgatggagttcgggacctacctgaattccactggtgacgtagacggtgccgtgctgattctggacaaggtggccgaattgatgccgggtacggaagccgggcagcgtgctccccgcatcaaggccggcattcttgccaacaaggaccagatcaaaactcagattgaagcagccaagaaagcccagagcaagtaagtaaaagctccctttccttgatcccctgattttggaaaacggccccgcagcggttcatgccgctgcggggcttttctttttttcgccatgagctgctcgcttaagcggcttccgttgagagggtgcccgtcagttcccgccgggtgcagcctgccttgaaggcgtctgttcctcttttacacgcggctgcggagaagggagcatcgcgccgcgccgctctttccgccaagcccggttatggaagagaaaggaatcctgtggagcatgcatgcctgttttgcggaataaaaaaaccggccccggcatgatgccgggccggctggctgcatgctctctccgtgggagaaaaagggcgttattgaagcttgatgacggtgtccaggctgtcccaggccacgcctgcgggcagcgtgattttgtattgggctccttccttttcaagcttggcggcttttccgtttccactgccgttcacgatgacggtcgcttttgtgaatttctcgccgatgtccttgatgaagagaggttcggagcctttcagctcttttccttgttgagcaatcagcgggctgacatgcaggtagacggtttttttgccgcgccggtccgtcttgtagcagctgccgccccagggctggtccttgtagggacctccgcgggtgttgtaaatggcttcccggtagggggcgatccacttgcccatggccaggaaggtttcagcctgtttcgggtcgaacgtgcccagcggcgtgggtccgatgttgtaaagcaggttgccgtccttgacggtgttgttgatcaggaatttgatggaggtttccacgggcttggccttcgccttggaggtgtaggaccagttgcccgtccagcgggtgccggggatgtccgccacggtcatgcagctttcccagggcgttttgtcgttgaacggccccagcttgcattccggcgtcaggaaatctcctttcaggtcgtcgggcagcggacctttgttgcctccgcgggtgccgttcatgcggttgttgaccagaatgtccggctggtattgcttgatgcggcgcatcatggtgcggggatcccactggttgagggagctgttgcccaggctgtcgaaccacagcacgtccacctgcccgtagcgggtgagcagttcactgatctggccgaagtagtattccaggtagcggtagtgctggtcggtcaggtagtaggggttgtaccagtcccgcccggaatagtagaagcccagcctgagccctgccgcatggaccgccgccgcgaattgccccacgatatccttgccgtagggggtattggcgatggtgaaggtgtcgtagtcggaggggaagttggagaagctgtcgtggtgcttggtggtcagcacggcatatttcatgccgctttttttggcgacggacatccacttccggggatcgtattgtttgggattgaagcggcggtgggcggagtcatattcaaagtccatgatgtttttatggccgcttgcgctgtccttggggcgcgccgcattgcgttcccagctgatttcccgttccagcagggaagaggggttccagtggacaaagaggccgaatttggcgtcccggaaccattttaactgttcgtcactggccttgaagtcgaagagcctgttgacggcttcattgatcaggtcgcggtccgcgacaggggaaaagacgtttttttcaggggaaagaaccaccaggccttccgccatgggctgcatgcggaagttcgggaggggagccttttccttgtctcccatccagaggttgagtttcagcgccctggccacgttccctatttcgtaggccttctggccgcccgcttcctccatgatttcgtccggcagctccttcttgaaaacggcctgcacaaaggggtggtttacatagattttcccgttttcccggaagggcctgatgtcttccggcagggctatccgttcgttggccgccatcgcgtagggggcgccgtggagtttgtccgtgtccacggtgaaataaacggcgtccttgagcttttcagacagctccttctggagtgcgtccacgttttcctgatagctttttccggggtcaaaacggttgttgatgctttccgcctgcttttccgtaatgaccgggcctatccacgggctggcaatcgcatccttcgtgccgccgcccacgatgatccggaaatattttccggcgtccttgtccgtcagggtataggattccgcgtcctttccctgctgcaccagcacgggctttccggtccgggaatccgctttttcccattggatgacagggctggcgggttcgtcctcaggagtgctgtagcggctctccagcgtggttccgaccacttcctccccgttaatgtaggctctgagccacggagctacgggctctccccaggccggagtgaggagcatccccccaaatgcggtcagaagacagaaggcatggtttttgagtttaaacatgggggaaaaattaagggaggaacagttgggaaaacaggataaaagagactgtttcagaaaagaccagtggaggcggtttccgggatttccttccggtagaatcctgtgggggatgggaaggcggcccgtcatgcatctgaggcgggggaggacaggcggcgtgtttgcccaggcttcccggcgcgcaagcgtctcttttggactgtttttgtgaagatatcctgcggcggccggtttttccctcgggaagtgtttcgtgcccgttgttggtttggttcaggagaggaaccgcccccctgccgggaaaggaatgtccacaagtacgggccggccgtggacggagcggcatgatgcccggcagtggcggagggagggatttccgggaagattacgtgggccgcggcgcggcggttgtatttcttgaggtgaagccttgcgcgggggaaggaaacctgacagaatcccgccatgcgcctgttcatgatgttctgtgtgatgctgctgctcgccggatgcgatacgcgtaccagcgtggaacgggcgcaggaggaaggagtgctgatcgtgggcaataatgcggaaccgcagagttttgatccgcatattgccacttccgtttccgatttcaagattatcaatgccgtgatggaagggctgctgcgcggtgattccagggatgacgccgcttttcatccagccgtggcggagtcctggacgcataatccggaggcggacaagtggcggttttctctgcggaaggacgccgtgtggagcgacggcgttccggtgacggcccatgatttcgtttatgcctaccaccgcctgcttcatccggagtttggcgggaggtacgcggacatgctttatccgctgaagaatgcggaggcttacaaccggaacaggcgcagcctgcttctgtgcggccccggttcccggctggccggggaagcgggtctggatggagaggctctggcacgggtggattgggagaggctggacggcatgggcgcccgggagctggaggcgctgcggaaggatatttcccggatggagtggccggacggaatgccggaggaaggcgcgcggagaatcgcggcccggatgctggaggatgtccgggccggaagaccggatttgtgggaggaggcccgtgtgggcgtacgcgccgcggacgatcataccctggagctggaaatgcgttctccgatgccccagcttcccctgctgctgcttcattgcacctggtttccggttccccgccatgcggtggaagcccacggcggcatgctggacaggacggggggctggacgcggcccggcaaggctgtggggaatggtccttttctgatggcggagcaccgtttcaatgattatgtggaggtgcggcgcaatccccgctaccggaacgcctcctccgtccggctgaacggggtccgttttctacccaccgtgaacggctttacggaaacccgcatgtttttcaacggcaagctccatgtcaccaataacgttcccccggagatgacggcgtacgcgcgggagcgcggcggcggtgatttctgccaggatgattattacgtgactattttttaccggctgaatacgtcgcgcgcgccgctggatgacgcccgcgtcaggcgtgccctttccctggccgtggaccgggagaccctggtgcgtgacgtggtgtgcgggggcggccagccgtgcttcggctttacgccggacggcgcaggctacaagacgccgcacggggtggagttcaatccggagaaggcgcgcgccctgctggcgcaggcgggtttccccggcgggaaggggtttccgcggctggagttgatgaccacgtccagggaggtgcagaagacgatggcggaagccatccagggcatgtggaagaagcacctgggcgttcacgtggatatccgttcctgtgaatggacggcctacaagttcgcgcagaattccatgcagtatgatttcagttcctcctcctggtccggtgattatctggacccgtccagttttctggatttgtggagctccgcctccgggaacaacaacacgggctggtcccgcccggagtatgagcgcctgctggcggagagccgcgccacgggagaccaggagaagcgcatggccctgctggcccgtgcggaagcgctgatgctttcggagtctccggtgattcccctgtactgggccaggcggtcctatttgaagaggccggaggtgcggggatggcatcccctgctgctggacaaccatttgtttgaagacatcagcctgggcgcgcccagggagcaggggaaggaggccgcgccttgaccaggatgattttgaaacgcctggggcaggggcttctggtcctgctggtgctggagaccgtgacgtttttcctgatacgcctgctgccgggccaccccttcatgggggagaagaagctgccggagcacgtcctccagcagctccaggccagctacgggctggaccagagctccctggtccagtacgggcgctactggtggaacatgctggtccatggcgacctggggccgtccctggtgaaggagggcatcagcgtggcggacatgatcggccagtcattcccggtatccctccagcttggcgtcataggcatggtgatttccattctggtgggcattcccgccgggatcgtggcggccctgtacaagaaccggtggatggactggtgggtgatgctggtttccatggccggcatctgtattcccgccttcgtggtggctccgctgctgggtgtggcgctgggcatgcatgtgcccggcctgagcgtggccggatgggattctcccggctgcgtggtgctgcctgcgctgacgctggggctggtgaatgccgcgtatctggcgcgcctgacgcgcggcggcatgcttgaggtgctggggcaggatttcatcaggacggcccgcgccaagggggcgggccccttccgcacggtctggaagcacgccctgcgcggcggcctgattccggccctttcctacctggggccggcctttgccgccatgattaccggctcctttgtagtggagacctgcttccaggttcccggcatgggccagcatttcgtgaacgccaccacggaccgggattatttcctgatccaggggcttgtcctgttttacggcatcctgatcgtcgcggccaacctggccgtggacctggtgcagatggccgtcaaccccagattgagggcggagtcatgaagaacagggaatggaacagcatggaggagcagggctcctccctgtggaaagacgcctttctgcggctttcgcgcaaccgcgcggccatgtgttccctgctggcgctggcgctgattgtggcggcctgctttctgggtccgctgctgccgtggctgccgcatccgaatgtgcaggacctgtcccgcattgcggaaagtccttcctggcagcactggttcggcacggaccagctcgggcgggacctgctggcgcgcgtgctgtacggaggccgcatttcactgctggtgggcgtggtggccacgggcgtttccctggtcatcggcgtgacgtacgggctggtctccggttatgccgggggcaggctggacgccctgatgatgcgcctggtggacgtgcttttcgccctgccgttcatcgtgctggtgattattttctccctgtccgtggaggaacccgcccagcagctgacgcagtgggtttccggcgtcacgggctggtccgtggagatggtgagtcccatgaccggattgattcccctcttcatcgccatcggcgcgctgggctggctgacgctggcgcgcatcgtccgcacgcagacgctggagctgaaggggcaggagttcgtggaggcggcccgctccctgggcatcgggcacatgaaaattctgttccgccacattgcgccgaatttgttcgggtccgtcatcgtgtacacgacgctggccgttcccggcatcatgctgctggaggctgtcctgtccttcctgggcctgggcgtaaaggctcccaattcttcctggggcacgctgatcaaggagggggcggaccgcatggaggtgagcccggaactgctcctgttcccggcgctgctgttttccgccaccctgctggcgctgaatttcctgggggacgggctgcgtgacgccctggaccccaagtcttccaaggattgacgcttttgaataaaagacaatgaaggttgctttaacgatttccatgctggtggtctccaacgtttttatgacgtgggcgtggtacgggcatttgaagaagggttccgcggcggacgacaagcccctgctgctgattatcctgatgagctggggcgtggcgtttttcgagtactgcttcatgattcccgccaaccgcctgggcaatgcgggaggccttaacgtggcccagctcaagatcatgcaggaggtgatcaccctgtgcgtgttcattcccttcgccctgttctacatcggggagaaatggaagtgggactacctgtgggcttttttatgcgtgctgggggccgttttctttgtcaatagggagcgtttgctcgggtgacagacttttttcgttcgcattcctctttcagggtggtcttaccatttagaaagatgaatatgaaaataatacctattcttgcagcagcagccgtagccgtcctggccgcaggctgccaccatcgccataataataatgattattaccgccccggtccgtcgcaccattataaccataatgattataacaacggctggcatcacgggcagaacaggccgggtcccaagccccgcccgcattacgtgaccgccaaccaggcttcctatccccgcctgtaccagctcatgtagtttttgcggttccgcaggaacgccgccgcttgcggaaaagggcagcgtaaaccatggagcggcgttggcgggaagggcgtgtgaagggacgcagttttggcatgccgttccctgcgtggcacggataccacctccgggccgcccgcttcccggtaccggcacgggctccggagggccctttgccgggcctgatgcttcgcgcacaggatataagcttgaaaaggcgcggtgcccccggcactctatgcgccagatcaatgactatagatgagcaattagacatattgatgggcggtaccgccgtcgtgatcagccgtgaagagttgaaggagcgcctcaagctgggccgtcccctgcgcgtgaagctgggtgtggaccccaccgcgccggatattcacctgggccataccgtggctattgaaaaactgcgccagttccaggaactgggccaccaggccattttgctcatcggggatttcacggccaccatcggggacccctccggccgttccgtcacgcggccccctctttcccgtgagcaggtgctggagaatgcggagacgtacaccaagcaggcgttcaagattctggaccgggacaggacggagatcgtctacaacggggactggttccgcaagatgacgtatgaggaagtgcttaagctcaattcccgcgtgaccatgcagcagatgctggcccgggaggatttcaaggcccgcgtggagggcggcaaggaggtgcgcctgcacgaaatgcagtacccgatcatgcagggctgggattccgtggaaatccggtcggacgtggaactgggcggcacggaccagcttttcaacatcctggtagggcgcgacctccagaaggaggagggcatgttgccccagatcgccatgacgatgcccctgctggaaggcctggacggcgtgcgcaagatgtccaagtcctacgggaattacgtgggcgtggatgaagcgccggaaatgatgttcggcaagatgatgagcgccagcgacgagctgatggaccgctattaccaggtgctgctgggcgagaagcgggacatgggactgcacccgatggaagccaagaagctgctggcctggaagattacggcccgctatcacgactccgccgccgcggacgccgcccgcgcggactgggaaacccgtttctccaagagggacctggccgccgcggatttgccggaagtggagatcgcctccctgcctgccggcatgaatgcgctggccctggtggccttcctttttgagaacgttttccaggtgaagaagtccaacggcgttttgcgcaaggagcatttcacgcccggcgccatccagttgaacgacgccaaggtgacggaccccgccgccgtgccggagctggcccccggcagcgttctgcgcctgagcaagaagcacgccgtgcgcttcaagtagggagccggaaacggcgttcacctttcttccttcctccatgccgggattcctttccaaattggaccgctttaccgtcggcctcatcgtcagcgtgagcgcggggattctgattccctgttccggcgtgtgggatacggtgttcagccgcttgagcgatgcggccatcatcctgctctttttcctgtacggggccaagctttcccgccgctccgtatgggaggggctgatgcactggcgcctccagggcctggtggctgcaagcaccttcgtgattttccccctgctgggcattctgagcatgccgctgtggaacagcgtgctggggccggatttgtgcatgggcatgctgtacgtgtgcatgctgccttccacggtgcagtccagcatagcgttcacctccatggcgggcgggaatgtggccgcggccatctgctccgcctccgtttccagtctgctgggagtgttcctcacgcctctgctggtggggctggtgtggtcccgcggaggggagggaggcgtggatttttccaccttcctgaacatctgctatattattctggtgccctttgtggccgggcaggttgcccagcgctggatcggcaaatgggtggtcacgcaccggaacattacttcctggacggaccacagcacgatctggctggtgatttacacggcgttcagccatgcgatgattaacggcgtgtggaagaacctgccctggctctccctggtggaggtgcttgtcttctgcggcattctgctggccgcggccctgtggctgacggccttcctttcccgcaagttgcatttctcccgggaggaccgcatcgcgattattttctgcggctccaagaagagcctggccaccggcatcccgatgatgaacgtgatttttgccggagcgcccatcgggctgctggtgattcccatcatggttttccaccagctccagctgatggtctgttccttcctggcccggaagtgggcgaaggacgtgggaaagggagacaagctgtaaggcagcctccgcttgccggtcaatgcccggccaggcgcaggactccgtcgcactgcatgtcccggccaggaacgactacatggctgccgtaggaggggattttggccgtgacgggcttgttgcgggatttggacatgaaccgctggaagggctccatgtcctccgggatgatcttcacttccgtataggcggggttggacggcatgtccgtgatttccacccggaaggagcctacgccgttgccgtccggcgtgtagaattccagggattcctccggggtggaggggtgcatgaagaacaggaagagcatgatgcccagggccgccagggtgacgacggtcagcggaatgttttttctgaggggactgatgtgcatgcctgcttttcctttcttccataagattatgggttttactgggacgtgtcaacccctccggaggaaagccatgacgcggagccgctccatgttcttttggcggaacgggttccggcggagcaagggtggacggaaaaaggattgcgtccgcgggacaatgtggtagcttgtgcggacaaagggagccctatgaccgtgcccgtaaagatactgtccgtattgacaggactgagcctggccggaagcgttcaggcgcgcatctggacgaatgaccggggcgctaccgtcgtagccgtgctggtggccgtccgtgatgcggaggtggacctgaagcttcaggacggccggatagtagccgttcccaagaacgttttttccggcgccgaccaggcgtatatcctggaatgggtgaagtccggcggcacgcttccggatacggatgtgggggcggagaaccctcccgcgcagggtgcgtccggcggacgttacgttcccctggagccgaattgggacgctccgtggccggagagggcggccgcgcccggctatctgctggtgaaggccgtgcaggagacggatgagctgagcgtgtatgaaacggaccatttcgtcattgagtcccccggaaaattgccggaaacggaacatatggccctggcgcggcgttttgaaaccattctgtccgccctggcggccgttcccatgaatctggcggtggcccgccgcccctcccgcaagtatctggtgagggtatgttttcaggaagaggatttcaacaaggcgccgggcctgcggaacgggaggctcaagttttcccccaccagttttacggccctgctgctgcgggataaaaagggaaagccgctgaagctggacgcggtggatccgcgctttgccgtcacccactgggtggcgcagtccatggatttggaacactggctggtggacggtttttccgcgtacatggcttttcttcccatggagaaggaggcgatggtattccggaagctcccgggaaggctggctgccatgcttccccgcgccgtgcgcacgggcagggagccgctgcctgccctggcggacctgctggcgcgggattccgttcattccgccgcaggccatggcctcccttcaaagggggacgcgtcccggtactgggccgatctgttatggacggtgtactggtgccatctggaaggggacggcaaggcggaacgcctcaggcgttacctggaagcctgggatgcggaggacgtcaacggggcgcacgccgttctgctggacgggaaggctccggaagaggtggagagggaaatggccgcagcctggaaaaaactgggcgtgaagctgaagttttcaccgtccgccccttccgctgcggacgggaaaaaggcggcggagaaatgacggaaggaggggtggaaaagcctccggtttccggaaaatccggagcgcaccgggtcagatggtgccgttgagttttctgcctatccagaacagggtgagcaggaagagaagggccgcgagcgtgtacgggctgcaccagagcaggatgcgtgtttccatgggcggcggcacgggcagctccttgatttccttgatgagctgctgtatttcctccgccttcaccatgcgtccgcgcgtgatggaggtcatttcctccatcagggcggtattgacgggctggccggttttttccagcgtctcgcccatggtgatgaccggaagcgtgacggatttgtccggttccgcggaggatgaggcggtcagcttccaggtgccggggcggttgattttgacggaggcggtgaaggaaccccaggtgtggtccatgttgtccatctgcacgcggctggtggtgccttccggggcggtgatgtccaggaagacttccccgttctggagaggcgcccccagtttgtcggagaccatggcgttgacggtcagcgtatcccccaggcgggggcgttccgggttgggaatcaggcggattctttccccggcggccatgttgcgctggtaactcatccagcgggccacctggctccagaagcggtagtggtatttgtcctccacgccgcgccgccagcgccaggcggagtccgtccccatgaagaggacttttccgttgccgtaggactgggtgacgatgaggggaatgcggccgtaggcgtttttgtctgccgcatgcacggccaggacggtggttccggccttgggccgttccaccggggcgtaccagttgaagcccggcaggttgcgccacacttcctcgttttcaccctccgtatccgccagcatggtaaggagggagccgcgcccctccggcgtcaggatgaggggggagggggctggctgggtggttccctccggcttggcggtgaggaacgtgacgggtatcaggtctcccagctcggatttcaggagttccatctgcttgccctggtagccgggcaggaagacgatgccgctggcctggtttttcaccatgcccttgagcagggcggcctgttcctccgtcagccccttggggcccagccccacgtctccgatgaagatgacgtcatactgggccaggtcttccatcctgtccgggaatttgaccaggtagccggggccttcccccatttcctccagccccgggtgaaagagcagggtatgcacgtccacgcccgggtcgcggtacagggcgttccggatgaagcggtactcccagcgcggcagcgtgtcgatcaccagcaccttgatggattccctcctgccggcgatgctgaaggaggaggcgttgttgttgtgcatccgttcctggggctggacggggagcttgagctccagcgtttccgccccttccttttctatcttccacaggacggcgtcggacacttccccctgggccgggatggtgaccgtgcgggtgacggtttttccggtgtccctggaggccagggtgagcgtggtgcgcgtttccttgcccagcgtgcttttaatggtgaaggggatctgcaccgtctccccgatgatgccgtaggtgggggctttcacgtcctggagggccaggtcgggcagggggtacggactgccggcgggaatgatgaagaggggaatgcccctggtgcgcatgcgctgggcctgcgtcagcacggaggaggaggcgttgtggccgccgtccgtgaacatgatgaccgcccgcaggttgtccgaggattgcatggcgtcctccagcggcttggccaggtccgtgcaggccatggcgtaatccggggaatccggcggagggggggagccgaaggcggcggattccaccacgtgcgtgtctttcagggattccgtgctgttgcccttgatcagctcctgcgcgtaggccgtgcgggtaacgacgtgctggggggtgatttccacgtcctgcgtttccatggagccggagcggtcctccaggatggagaccttgggcttctcctgcggggcggaggtgacgacccattccggctggaagagcaggaagcagatggcccccagaatcaccaggcgcaggagttccagcttgaacgtcagcggacggcggttgcgtttgcaggcggtgcggctcatccagacgccggccgccatgaccaggacggccaggaggacgcttaaagcggtaggttgaaggctcaggctcatgggcggatggtgggggagggacgtttggccgtgtgcctgggcaggcacaggaaagcttccagcagcaggcaggcgagggaaatgatgagaaagagtttccaggcctcctgcaccagggagggcgtttccgccgtgctctgcatggagctgatggaggcctccggcagaaggaggcggagcttttcatccgtaatctggtccggattgtcttccgaccaggggcggttcacggcataggtctgcgctcccaggcggtacacgcctgccgtgtccgccggagagccggaggggtggctgccctgggcgttgtccatgcgcacggggatgtccgtggcggattgcggcagggccgggtcattcacccggagggagatggaagtggagaagcgttccgccccgcggtccgccatgcgctggagcagggggagcagcaggtggccgtccgccaggttggaccaggaatatctgggcagagtccccaggaacagggcggaacccgttccggccctgacctgggccagggcgcaggtgccgtcatcccaggaggccagggtgcggtatttgcccagcaggggcttccggcgcacggcgcggagccggttggcgggaatggccgcctggtcggaaccgtcccggaggaatccgcgctggcggtcccatgtttccaggcggtagtactcctcgggcggggccgtttccatcgctccccaggagacgcccaggaacggatgccgcgtgccgtgggccgtatcgtccggcaggaagaggacgattcccccttcttcaataaaggccagtagcttttcttccatttccgcgcgcggcggcggtccgtaccaggcgaccatggactgggaggccagagcggcctgcgccgcccgcgtgttgccgggcatcgtggccttcctgttgggcaggccgggaggggcggacatcagggagagggtttttcccacttctccggaagggccgcagatcaggatgttggcgaggggccggggggcgaaggtgaagaaagaaatgtcatccctggtgaagtcgtcatgaggcagggaaacgaagccgaagccggattccttcccctgcggcagcggaatttccttcctgatggcggtgctttccccggccagttgcagcgtggcggaggcggcggcattatccacggaaaggtgtaccggcacgtcctccggctggttggggttgaaaccctggcgcagcacctccaggtccagcaccagcctgccgttgttcacctgggcctgcctgaccctgatgccgcggttgctttccggcctgtcgcggagggccatgatgcggatggaggggggaatggccagagcggccagccgctggcgcacgccgggccagaggggggaatccggcctccaggaggaggcctgcatgtctgaggcaatccagatttccgtctttccggaaccggactcctccagatacgggatggctttttgcagcagggccggaatatctgcgccgccgtccgtggttttgctgacagtcaggtccgccagggcttccggggcgggaatctgggtgacggttccggtggcggaatcaagcagggacaggcggcagtggccaagctgcgcaaaggtggattccaccagcggcgggatggcgtcccgcagggagttggttttgtccggccgtgcgtccatggaggcggaacggtccagaaccagcaggacttcattcagtccggaactcccccagccgaagaagctgctgagcaggggccgcgcaaaggccgtcaccagcgccgccacggccaggacgcgcagcgccagaatcaggtagtgcagcagttttttcgtcccgcgggtttccctggcggcgcggagcaggaattccatggccgcccaatggacggagcggtgccgccacctgttgaccaggtggatgatgatgggaatggaggctgcaaagagggcccatagcagccagggagaggtgaaggacatgggaggataggggtagttggggattcaggcctggttgtcaggtagagggagggtcgggcagcagctggcggaggatatgcagggtcatttctccggtttgcttgaaggatttctcacccagaatgcctatgttgtccttggacgtgtgccaccagttgccgtcctgaaaatcgtcgatgatgttcagcgtatccatgccgaggtccatgaaggggacgtggtcgtccagaatggcgtagccggagaccccccattcctccggtgaatagcccagttcacgaatggcgcgggaataaacccggtacatggactggggcgtcatgaccgggatgcgtatcttttttccctgccgcccgaccatgtccaggttgatcatccacttgggcagcggcttccgcatggcggcggcatagtgcttggagccgtacaggccgtcgtcactgtccatgtgttccgcaaagctctcttctccgtcaaaaaacaccagctccaattccccggcgcgcgcgggttccccggccaggatgcgggccgtttccagaatggccgctgcgccggaagccccgtcattggccccggtgaagccggcgatgccctgcttggtgtcgatatggcaggtcagcagtccccggaccggagcctggaaatccggcgccttgccaaagcgggcccgcaggttgacgaactggatggggcccttggatgtttcctgttcaaaggactgctcctggcaggtccagccgtgtttggccagttccttcttcaggtagtccagttgctggcggtagcctggagtgccggaaccccggtcccccatctccgtcatccgggcggcgtggaacatggcgtttcctccgttgaagtgggttgtttcctggagccgggcaggaatggtttccgcacccggaaggggcgtttccacgggatttccgcactgcatcagcagggccgtgagcaggatgagtccgatgcggggcgtcatgggaaaaagacggagtggaaggtttacttggaagcggaccattcatcctggcccagaagttcaagaatgcggacgaattcggccttgctggaaaaggtgatctcaatggagccccggcttccctgtccggaaatatttaccggcgtgccgaattgtttggcgagcacgctggaaatcttcttgtactgcggggaggagggctttctggcgggagccgccggttccggaggattgagaagcttctggatggctttctccgtctggcgcacggtgtagcccttgttgacgatgtcgcgcccgagctggatttgctggtcctggttcttgagggacaggagcaccttggcatgccccacgctgatgaaggcgttgcccagcatgtcctggaccgcctggggaagatccagaagccgcatgctgttggctacggcggcgcgggatttgcctacccgcttggcgatgtccccctgcttcatgcggaattccgttttcaggcgcatgtagccggaggcctcttccagcgggctgaggttttcacgctggaggttttcaatcagcgccagctccagcacgtccttgtcggaagccttccggatgatggcgggcacggtggacaggcccaggatgccggaagcgcgccagcgcctttccccggcaatgagctcatacttgccgctttccgttttccggacgatcagcggctggatgatgccgtgctccttgatggagtccaccagctccgccagttgttccggggtaaagatggcgcgcggctggagggagctgggaataatggaggcatgggataattgatgcacaacgtctcccgcctggggagccgccaaggattcacgagacagattttgattgataagggcgtcaaagcctttccccagagccgattttgccatagcagggaagaaactagcatgaaccggttccgttttcaacagggtatttgttatccgcagcggaaattcccgcttgtgcggccggtttcatcctccatgttcccggacgtgtcaggcgtgttgcgccccaccccgcgggcaggtcaaagatggcggtgccttgaacggcccgctgccgccgcgctggtttccggcaggctgcggatatcctgtcccgtgcagggcagggggcgtttcaaggccatgaaccaacaaatgaacgagatgaacagcaatgaacaatcctgccatggcgcgggctttccctgcggaaccgctgcggcgcagcgcgcacctgaattccttgaactccttgcccccgcccgccgatgaagctcaatctgacggaagaacaaaagaaagccgctctggaagcgggaaagcagggcatgaaaaacgcctatgagaaaagcaagtaccggcccggattgacgtggtgggaacgcctcctgtgggtggtcctggcgggagcggcctatgcggcgtcctccctcctttccggctgcgggcataccatagacgtgactgcggagcggacggagatatgcagggatggcgcctgcctggtgctggaaccgggtcgcctgtcctattcccaggcccagccggagacggaggtacagcctgtgatccagagaatccggaaaggcaaatgattccgtgccgtccggtccgcaacctgccgggacaagcggttctgcatgagccgtcccggcgggaattgcggaagtgaatggcctgtggcgaaagggggatggcatgaacgctttatcagccgccgccgcctattatctggctgcgggcaggagggaagaagagatggatgaggatgggcgctgccaggatgtctatgtccgtaccccggagcttgtcctgatggcgcgccgggtggattcctccgctcctttcggcaggattatcgatgtccgctgccggtttgagccggaacggtgcgatgcctggcatctccattttctggcgggagaggtgcgggaactgttgacttatgaacgggaaattctttccctgccatggattctgacccagcatggcaagcgcggggacgggcggctgatgaagttgtcttcttcccggttctgccgcctgctggcggcgtctgcggttgccggaccgctctcctgaccctgttgaagaaacggaagcatccatgcggaaaaccgcatggatgcttttgttgcatgctggagaccgccctgatgaaagcgtgctaggcattcaaaggtgccggccgcttcccggttcgcggcatttctggtgaaagtcctgctaggccagggcggcggcgaactcgtaggcatttttacaacggttccgccagccattaccgaaggtgctgaactgcctgcatgaacaataaaacgactcgcgccgctcgtaaaggctgtcaaggagtttgcgttctccggattctgcaagaacggtttgcagcgtttggcgggtttgttttccgggaatgccgtccacggcaattccggcgccgtggtcgttcaaggctcgctgcaatatcttcccggtgttcttgctgccggaattgaaataatggtcccgcaggaagaactcaatgcccggatgggtgtcagaaccaatccaggaacggacggcggcggtattgtccagaatatattgaagacagccttcccaggcttcttcctgttttccggcgtcaagcaaggctttgaggcggttgaatacggcgggttcaaagccgtcgcagatgccgcagatttcccacttgccgcccttgtcagcggcaggaaggcgggaaacgcgcagggaggccggcccggtgacgcgatcgtcttcaaagcggagaatggccgcagccatctttttttctgtagtattcataggttccaataatggtggaggttcggcggacctgcaatgaatgcgtcttcaaggggaaaaatggctttttgacctgccgttttccatcaatgaacggtccgccgcttgagctgcatgcacggctgccggggataaatgaggcgtctccggagcggtttgatgcgtccctgtatgggggtgccgttctttccccggcggcgctgggccctttattcctaggctattcatgaaccattgaaaacaaaaagcataacgcctgaaattcacaaaacccggtgagggatagtgattccttccatttccggagattggcggcattaaagacgccgtggaatcgtttccggatattccccggactctgggagccattcaggaaagtggcgctcctctccgaagcatggcacaggggttttccgcgactgcttcggtgcacccggaatttattatgcgcaaaaaggatgattaagtcttgcgtcccgttgggaatggtgccacagtcaaaggactttacgttaggatacttcgccccttggcctccgtgccagggggcttttttatgaatgcggcccgtcgtgttccggatactgcgggcggtatgaactcctgcctccgtttccggttcaggatgggcgtaatcggaaacggcatgccgcgcattcccgtttcaggacaaatccggagggaacggccttttccgttttgacgtgcggcctgacgtgggactgggttctccctggcaagaaaaagaaaacccctcaagcggtgaacttgaggggtttataatggagccgcttgtcagatttgaactgacgaccgtccgcttacaaggcgggtgctctaccactgagctaaagcggcgtggtgaatgaggtggcccatatctacagaagatggcccatggtggcaagccgaaaatggggtggcaggcatggcgcgcctcattttaaccgcttcaggagtcaaacagggagccctgctccagtgccggtccggcaggaggttcctccggtccgggagatgttccggcctgcggcgtctccgtatccggaacggacgtgttttccgcctgttccgtggcagcggaaggggagggcgtttcttcctccgtttcctcgtctccggttttcgccgggggcatgatgcgggagacgcgctccacgggatgtttggtaatgatgttgccttggaccccgcggtttttaatcctcaggtccgcgaagtggaagggcctgaccaggttgcggagtttcagcacggccttcagatagacgttcacgctgatctgggagctgttttcctccgtttcatgcacggagaagtggaagatgcgcgttcccttcgcgccgcgggtgagcgggtattccttgtccctggtgaagccgcctatgcggaagcgcttggcgtacacggggccgtcccttccgtcccggtagatcaggttgaacacggggtcatcatccttcttgatgacggaaatataaagggggttcttaccggcgaagaatttgtcctgaatccgcacgatcttgagcacgcccgcgctgtcgatgaccagcacgtcgtccagcgtggagcatttgcagacggggtttcccttcttgacgccgtacccggcgaagccttcttcgtcaatatacagcgtttcattggccacggccacctgggcgcggtccacggagccgaaggaggagatttccgttttcctgggataggccgcgccgtacttcttgcgcagggcttcaaaccagcggatggtgaatttggtgagctggctgaggttcttctgcgtctgttcaatgtccgcttcaagctgccggatgtgctggtccgccttgaacgcgtcaaacttggaaatgcgcttgattttaatttccgtcagccgcaccaggtcgtccctggtgatgggcgcgcgcagctgggcggcaaacggctgcaattcccggtcaatggtgccgagcacttcctcccacgtctcggaatcttcaatggagaggtaaatgcggttttcaatgaaaatcttttccaggcttgcctggtgccatgcctcgttcagttccttgaggcgtatttcctgttcctggcgcaggatttccctggtggagtccgtgttgtagcgcaggatgtcgctcacgcacatgaaccggggcttttcctccacgatgacgcaggcgttcggggagatgctgacctcgcaggcggagaaggcgaacagggctttcctggtctgctccgggtccgctccggccgggagatgcaccaggatgtccacgtgctgggccgtattgtcctcgatgcgggctattttgatcttccccttttccgcggcggagacgatggtatcaatcaggatttccgtggtgactccgaacggaatttccgtgatgcggagaagcttcttcgattccgtgaggatgcgcgcccggatgcggacgcgccctgtgccgcgttccccgtcccggtagttggtggcgtccatcacgcctccggtcgggaagtccggcagaagctggaagggctggccgcgcaagtgcgcgatggaggcttcaatcagttcgttgaaattgtggggaagaattttgctggaaaggcctacggcaatgccttccgctccctgggcgaggagcagggggaatttgacgggaaggctgaccggctccttgttcctgccgtcataggaaagctgccattccgtgaccttcgggctgaagacgacctcacgggcgaaggaggtgaagcgcgcttcaatgtagcgggaggccgccgcgggatccccggtcaggatgttgccccagttcccctgcgtgtcaatgagcagccctttctgtcccagccccaccagcgcgtccgcaatggagcggtcgccgtgcgggtggaatttcatcgtgtcccccacgatgttcgccactttactatagcgcccgtcgtccagccggtccatggcgtgcaggatgcggcgctgcacgggcttgaacccgtcattgatcttgggtacggcccgttccaggatgacgtacgaggcgtaatccagaaagtagtcggcatacatgccttccacggactggctcgcgggagcaatgtgggcgggttgagtcacgggcgcaaatattaaaggaattgttccggaggggcaagtgcgatctccggaaagaaaataaccggccttccgttaaggaaagccggttaccggaaaaaggaatggctaaacgcaatcaggcctgtttggccgtaagtctgtttttgagttcctccgcttcggcgcgcagggtgtcgagcttggttgtctgggcttcaaggtcggcgatttcttccaggactgctgccaggcggcgcaggtccgcgggctgggccgcagcgagaggctgagctttgggagcggctgtatttttggtgccgggcttgcggccgcgcttggccttggtggccttcatccagcttgaaatggttaccgtgctgatgccgaagcgttcagcggcttccttctgggcgcctcttttgttctgagttttccgttcagcgatgaagtcaagaacggattgtttttcttcaggcgtatagcgcctcttgtttttggtgctgtcgttggagttcatgatattgacgagtggctatttgtttaatcaaaggtccgtagggtagcaagcaaaaagagcaagtattttgacataatttaaaagactgtttaaatatagggggcatattgttgacgttcagaggtaatatgcttattttattcatgatttttattatttaaaatttgaattgtttaacattccgtgcaagggcgcttgcgggatgtttaaacgcttttttattttctgcgccgcatgaagtctttttccctgaattccttgttgaatcaggagttccggagaatttcgcgtcccttcgtcagtccggattttgagattgcaggagccggagggatcgtgtaaaatcaccccaatcttccagccattttatcatcatgaccgaccagccagaaaccccgtcttctccagaggctcccaaattacgccgccgcctggtaacggcagcccctgcggcagcgcccaaagtaaagtttgcttcccccgccgcggaaggcgtggaagttgccaaaccgcgtttcctcactcctgaattgcaggccaagctggcccaggaacaggaggaagccgcgcgccgtgccgcagaacaggcggaggcggacaggattgcggcggaaaaggcggcagccgagcaggaggccgcccgcatcgctgcggaaaaagaggcggccagaatagccgccgaggaggaagccgccagaatcagggcggagcaggaggccgcggaagccgctcgcattgccgcggagaaggaagcggcccgtgtggcggcggaagaggaaagggcccgtcttgcggcggaacaggaggaaaaggaagctgcttcccaaccattgcccggtccggcggtggatgcccagattcaggatgcccttgccaaggtggcggaggcccagaaagccctggcggacgcgcaggccgctgccctggcgcaggccgccggcgtggctcccgctgccgttcaggcgcctgaaccggctgctccggcgtctgccgcggcttccacaggttccattcccaaattgaaagttttaaagacttccccggctcctgccccggcggaggaagctcctgccgccgccccggcggaaagcgccgtgccccggttgaaggtgctgaaatcccctgcggggaccgcgcccgttccttccgtggcgtctgccgcggcttcccagcccgtggctgccgcatccgtttctcccaccgccagcgttcccctcgcgggcacgggcggcatccagccgcctgccggcacggaaaccacccgggaaatggtcgcctccgtggataaatccaaatccctgctgaggggcgtcatttacggggtatgcgccctggtgcttgccgctgccggggtaggaatttatgcttggcataccaacagcaagaaagaccaggtggaaggggaaaacgcgcgcctgaatgcactggtggtggaaggcggcaaactgggccgcagccgcctgtttgattccaaaaatctcagccgcgttccggacgtgaaggtggtgcccaatgcggaggacgccgccctgctcctagccaatgtgaggggagccaagggaaaccgggaaaactggcccggcgccgcccacctggtttccatcatggcccagatggatgacaacatcgcacgccaggtggtggaagacatgaagaaaaacgtcggcaggtacagcaaggagaaatactccatgatggtgacgctgctggctaaatcttccagccccgccatgcgcgacatgctgaaagacctgtacgcctccatcagtgatagcaagaacaagaaaattcaggacaagcaggccgtggtgctcaagtacatgcgctttgccatgaagctggacgacctggatgacgtcatgaagattctccagcagaaggatgcttcccaggacctggtttcctccgccttccgcacggcccgctacctgattgacgaagcccccccggccaagcgcatggcgctctcttccaagctgctccagtaccagaagaacatgccggaggaaaacgtcaaggtcctctacaagctgctggcccgcaccggcgatcccaaggtgctggacatgatggaaaagagctacaaggaagaccccaagaaggcgctcgccatcatcaccgcctggggggactggaacacggatgacgccgttccgtacctgttcaaggcgtggaaggatgaatccctgcatgaacgcgtgcgttcccaggcccatgattccattctccgcgtgctctccgtggaccgtgaccgggatgacaacgccacgctcaagctgttcgagcccctgatagcggacgccaagacgagcgaacgccgccagttcctggtttccgccttcaagaggctcagcaaccgcccctatgtgatccgcctgctgggccgcatcaagcagacggcggaagaccacaggaatgtggtggaacccaagttccaggccgcagaggaagccctgttcaaggcggaggacaaattcaaggccaacccgaacgatgccgccgccaaggctgattatgaagccaaggaaaaaatctataatgagctggccagccagaaaacaggggaagacaaggtaattacggcggtggacaaggccctggaaaaggtcaggaagacgcctgtgcccaccaggaaggccgcttcctccgatgacagggaggaggacgaatcttccgtcatcaagacgatttaaacggcttcattagccgtattcggaaccggagggaggacatccctccggtttttgtatgtaagggaattcccttcgctgccggaaacgaggtttccttgttcccggtacacgatgggctcctccctgggaacaagtggctcctgctccttgccagcggtggcaaaaaacggaagaaggaaagctctcttccgttgactgtggagccagaccgaatccgaaggccggatggccttcgctcccaggaggggggccagtagcgttgccgggaagggacgaacttttcagggagtatggcatttccccgccattccggcctgccggaaatatttcctgccgccgttttttccgcatccggctcttacaggaacagtcctgtctggtacaccagcgtagctgtcagaaaccccagcagggtcaatccaccgaattgcgccagagcaaaccaccaggtgccagcttcccgtttggcgacggtgacggtgccgatgcaggggagggcgatcaggcagaacatcatgatgctgatgccctggaggggggtgtagctggctttaaggcgggcgttcagggtctgctgggctgccgggccggagtccccgtcctgcaccgcatagagaatgcccatctgggtgacgaagatttccttggccgcaaaagcgcccagaagagcggaattgatcttccagtcaaatccggccacttgcgtgacgggttccatccagtggcctatttgtccggcgtaggaatgttccatggccgctgccgcattcggcgcggttccttcctccggcctggggtaggtgttcaggaaccacaggatgatggaggcccccagaatgaaggttcccgccttccggacgtacatgaaggcccgcgaccacatcagggcgcccaccttccgcagggaggggaggcgcaggcgcttcatgtggtggagagagtccctctgggcggtcttgaagagcgtgtttttcaggagccgggcgcagcacagggccagaaggacgccgctggcgtaaatcccgaacaatacggtggcctgcaggcgggagggaaacagggcggagacgaacatcatgtaaatcggcaggcgacccgcgcagctcatcatgggcaggacggcgatggtgaccaggcggtcgttgcgcgcttcaatcctccgggtggacaggatggcgggaaccgagcagccgaagcccagcaggaggggggcaaagctgctgccgttcaggcccatgattttcatgatgcggctcatgaggcgggagacccgcatcatgtatccgctgttttccagcagggtgatggctccgaagagcagcaccacgttgggaagaaaggccagcacgccgcctacgccgcccaccacgccttcccccagcagggattgcaggcggggccacggttccagcatgcggcaggcccagatgctgaacatctgcgtgcctgtctggatgagcctgaccagagggtcgccgatggcgaagctcaggaagaaaatgatgtaaacgatgcacaggaagataagggaaccccatatcctgtgcatcaggacggcgtccagcctggttctccacctgttgtcctgcgcctctgcctcccgttccataaattaccggggagtaacttagaacctgcgaatttgacaggcaagcttaaaatcccggatttgcgggaaggcggccgggccgtttggccggctttgagccggtgcctgttccggattgtttcccagggaacagcggaagcccggcttctgctagcggcgcatggccgcaagcccctgaatgaacagaatggccgccgtgcagccgaagaccatggagggcaggcactggagcatatatagcgggtccgtggagtcgttcccgtaagaggggaagatgaaagccatgaccagtgcaatcagggccaggccccatgccagccaggacacggcggggacggcagtgccggagccagcggcagtgagccgggagcggcttgcttccctggggtcgcgcccatccgcgtcccgtccggaagaagccggctgctttttcttgacggggggcagggatgccggtgtttttacggcgttttccggtttctgcccggagggggaagagggggcttccccaaagggaagccccgttttaacgtgaatcagtacgccgcacgccgtgcagtgcatgccggctttttcatccagcccggccgggtaggtatacccgtgcccgcacagggagcatgtggcggattctctcatgattcaggctgaatgggtgttagtcgtccagcggaaggaggtccgccctgtcggccttggtttccggcctttggcggatttcctggagcttggctttcatctgctcgcagatgtccggatgctgggctgctacgttgttgagttccttcgggtccttttccaggtcgaacaggctgccgccttccggggacttggtcattttcgctcccagtccgttgatcccgtcgcggatggctacgccggcgggaatgaacttccacttgccgtggcggatagccagagccttgccggtgctgttgatgacgtggtagtcgcgtcccttggcggatttgcccaggagggcggggatcacgttttcagagtcgcggaaggaattggccttgccgggttccagaagctgttccagggaggcggccaggtccatttggttgaacagggccttgctcgtcgctccgggtttgactactccgggccatttgacgatgaacggaatgcgggagccaccttccagaatgctgtatttgccggcgcggaaggggcctgccggggagtgggtggcgttgtcccggacggcaaaatccttgtagccgtcgtccagcacggggccgttgtcgctggagaagatcaccagggtgtccttttccagtccggctttttgtagggcttccgtgatgcggcggacgcagtcgtccagttccacggtaacgtccccccgcacgccatgctggctcttgcccacaaagcgtttttccgggcagcgcggcacgtggatgtcatgcgtggcgaacatcaggaagaacggttccttggccttggcgctcttctggatgtattcaatggccttgttcgtgatcacatccgcgttttcctcatccttccacagggcgctcttgccgcccttcatgaagccgatgcggccgatgccgttgatgatggcctggttgtgcccgtggctccacatgagtttgagctggtccttgttgtccttcccgttcggaagaccggggaagttgtgctggtaggacacttcaatggggtcgttcgggtccaggttgcggacgttgccgttttccagaatcacgcagggaacgcggtcgcccgtggcggcgaagatgaagctttcatcaaagccgatttcgttagggctgggggcgatgtgcttgttccagtcaatcttctttcccctttcccccaggcccaggtgccacttgcccaccatgtaggttttatagccgtgggattggagcatcttgggcagcgtgggcttcttggtgtcaataatcagggcggcgtcccccggcagaatgcccgtgccttccttgcgccagggatattccccggtgaacagggcatagcgggagggagtgcagacggaggtggtggaataggcgtccgtaaagcggacgccctgcttggcaagcttgtcaatggaaggggtgggaatccccttggctccataacagcctacgtctccatagccgaggtcgtcagcgtaaatcatgacgatggctttgggcggcttgacctggggcgtggtggcggccgggcaggccgctgccgccgccagggcaagcatcaggtgtaatgcgggtttgttcatgttgtcaggtgtgtgtgttgttgcggttgatcaaaagatggttggaaaaatgccgggattctgccgggggaagggccgcgcggtcttggctggcgcttttaatgaggctcctccggcggcggcaggggctccgtcatggggcgcatgctggcattctgccagatgtaacgcttgtagagaaccttgatagcggccgtcagcgggacggccagcagcgcgccgatcaggccgcccaggataagcgtccagatcagcacggagaacatgaccgtgagcggatgaagctccacggaatcccccacgattttcggctggatgacccatccgtcaaactggttgacggccaggaagatgccggaaacgatcagcacgtgctggaagtctccccacgtaaaccaggccagcaggacggcgggaatgaaggcggtgatgatgcccaggtagggcacgatgcccagcacgcagaccgccgcgccgatggtgacggcgtacggcaggccgagcagtttcaggcagatggcgatcaggatgccttcaatgatgctcaccagcatctggccgcggaagaaggaaatcaggtatccgttgatttcctccatggtgtccaccacgtcctttctgaatttggaggccttcagcggcaggatgctgggccatttttccctgatcttatccgcttccagcagaaaataaaaggcgaaaatgggcgtgatcaggatgctcaccatgatgcctatggtgctgtacagggcccttccgccggaagtgagccagctcatcagcttgtcctggtaaaaggaggaattgatggtcatgtacgcccccagtttttcccgggcggtccgggcgtttctcaggtcgtggacctccgcgtccgtataatggccggtattcagttcccgcaggctggtgctgtaaacgctgtcaatggtgcgggagatgaagggaatttcaatggtggagtcaatcagctcggaggtcttgtcccagagctccatccggttgtcaatcagctcatccgtctgccggatcaggggagggaggatagtggcgccgaagcccaccaggacggccagagccgcgaacatgaccgtgaccacagcccaggggcgggagaatctgaagtgcaccagccaggagacgatgggttccagcaggtaggccaccacggcggcaatcaggatgggcaggagcaccggttccagaaagcccaggagtttcaccacttcaaagatgacgaaggccgcgatgcacagcatcaccaggatggcgacgcccgtcagggcgtaccagcaggtctttttctggaagggtgagggaatgcggcagtcgccggcggcttcctgtgaatcctgttgctgtgcgtcgttcatgccggtggtagagagatggctggataggggctggctcaggccgcgggggtcttgtccgttttcccgtcaggcgcgggggcggcctcctccggagtttccgtcgcggcgggcgcgggctgctggtctcccgcggcatcctggggctgttccttttcctcctgctgcttgacgtggttttcaaactcctgctccgtaatggcctggggcgtggggtaataatccccggcagggggcgcggccggaacttcccagtgaatgcgcaccagtctgttcctgcgctggaccacaacgcttgcctgtgccccccgctgggtggtgacatattctacgaggtccggatacggattctttctcccattgatggaaatgagcacgtcccccgttctgaggccggcgtcccacgcgggcgaccattcggccacgtaagccttcatggggccgttcccgttgcggtcctggatgaaggtgccccccatcaggttgaaggaggagggcgcgggcatccggtggctggtggagctgaaataaagggcgttccccgggccgtccagccagaactggcgcgcggccagcgcgccgtagcccaggatgatgtcgatgtcgtcgggaatgcccatcacttccggattggcgaagctttcacagagcaggatgttcttcaattccagggggccgagctggaaggagctcacgtgcatgcattcatgggcgtaaaagccgcccgcggcggggctgtagccggaataaacgctgacgaacgcgtccgggtaggcctgcttgatggcgttccagcgtttcttggagatgtagacggcatggggcgcgcccgtatccagaatgatgcgccggccgtgcttgtccgcaatctgcgggtagtcggaaccgggtatcagggaaagcttgtgccagctccgtattttggagggcagtttgttgaaaaagcggtgggagcgtttgggatagttgatgttccacacgtacttccggatgcactcccagcccagcagtccgtcatacggcgcctggtccaccatcaccacgtcctgcttccgggaaatgggttctccgtcatccttcagggaaacgggcacattggccgtgcgcatggcgcccctgccgcgcaggcgggcgccgatggattccaccgcgggggagaaaagcagggacgtctggaccgctcccgtgtccacccccatcatcaattgcgttccggagctccacgccagggccacgggggtgccgtccagcgggttggccgcgtcaatgggcggagaactgctgtcctggataggccggtgcgatacgcaggaaacgcacagcatggttgccagaagcatgatggagggacgaaacataaagcattccattcataacaaacggaccagaggctggcaaggtttccttcctgcttatggagctttttggcggcatcagtccgtaaaacttgccacgatgtatctatctgataaggtagaagcatgatattcaggactttggcatatttgtttcttctgggctccgtgtcatgggcggatattccgcctgctccgtctcccggtgtttccgctcctccggagctgcgcctgttccgggcatgcatggagaaaagcggcggcagtgtcatgatttcccctttttccctgtatgaagttctccgttacatgcttccgggagcggcgggggaaacggagaagcagatggcggccgtattgcccggagacggaaaaatcaggagggactggacttttctgtctggtgatttttcgcgctcgctgcgctgttattccgccaaccgcatttttgcagaccggtccgtggagttgaaagacgcctataaaaaggccgtggggccggatgccgtggctcaggcgcccttccgggaaaacatggcggaagccgtgcggcaggtgaacgcctgggcggcaacgaatacgggaaaccgcatcaggaatcttctgaatccgcagcggatgagtgaccggacggtgcttgtactggtgaacgccatgtatttgagggcgttctgggacagtaaatttgaagggcgggacaccgcgctgcggacctttgtccgggaggacggcgctgcctgccaggtgcccatgatgaagcagcaggtattcacggagggaaggtcatggccccggcagggaggaatgtattatgaaaaggacggcgtgcggggggcaagcctgttttttacgggagggaagggcgcgccagttttcatggccgttcttcctccggaggggaggaagatgaagcaattcattgacgggatgaccgcagaggactggaacggcatcctgtcctccctgtccgcccgggatgccgcggaagaaacgcggaagcccggcggaaagcccctggagcaatattccagataccatctgcggctgccgcgtttctcccagtcttcccccacgctttccctgaaaaaggctctggaggcgctgggaatggaggacgcgtttaccggccgcgccgatttttcacggatggggagctgcgcgccggagccgttgaaaatccatggcgtgtaccagaaatgcgcggtcagagtgcgggaggaagggctggatgcgtccgcttccactgccggagagatggatccatttgccggcgctcctccccgcggcagggggccggagatcgaattcaaccgtcctttcctgtggctcatttacagcccggaggaccgggccgtgctgttcatgggaacttatgaagggccggaatgcgggaaaaaggaaggaaagccgtgaagtttgcgcgctcccaaaaatcttgattttcacaggggcccgtatagggtaggggtgagccgttatgaccacccctacgtttgaagatgccgtgagccgcattgtgcggaaggatccccgttttgcggaacgggcgtattcctttctgaaagatgcgctggatttcaccatgcagcgcattgaagagcaggaaaacggctcccagcggcatgtcagcgggcaggaattgctggaaggcttccgggattacgccctcgcccagttcggccccatggcctccaccgtattaaaggaatgggggctgagaaacgggaaaaatgtgggagagatggttttcctgctgattgaggaggatgtgttttccaagcagccggaggattccctggacgatttcaaggggttcatgagtttccgcaaggcctttgaagagccttacgaattccaggagcagcccagttgaccccccgtaccgccatgagcaaggaacccgatgtacgctggcccgctgaatgggaaccgcaggacgccgtctggctctcctggccccaccgcagggatttgtggcagggcggcctggatgaattgcagcagacctacgggagcgtggccgccgccattgccccgcatgcccgcgtgtgcgtgaatgccgcggaaccccttcatccgggcatcaggcaggcgatgcaggccgccggggtgcgggaggaccagtaccgcctgttcaaccatccggccaacgatgtctggtgccgggaccacggccccgtcttcgtgcaggacgtggaggacggctccctgatgctggcggactggcaatttaacgcctggggcggcaaatttgctccgtgggacctggacaacggcattccctccctgatcggcgcttccctggggcttcccgtgcgcagctcctccatggttctggaagggggcgcgattgaaggcaacggggacggcctgctggtgacgacggaatccgtgctgctgaatcccaaccgcaacccggaatggagccgcgccatgattgaggaggaattgcggcgcatgctgggcgccaggtccattttctggctcggttccggcattgagggtgatgatacggacgggcacattgacgacatggtgcgctttgtgtgccgggatgccgtggtctccattgtggagacggactcatcctccccccattaccgcgccctggcggaaaataatgaacgcctgcaggatttgaggggcgtggacggttccggcgtggaggtgattcccctcccgatgccggaccccctccatgcggaggactggcggctggaccagctcccggccagttacgccaatttcctcatcgtgaatgaagccgtcatcgttcccgtgttcaaccagccccggaatgacgaccgcgccctgggcattctgcgggaatgcttcagcggaaaacaggtagtcggcgtggacgcccgcaagctggtgctggaaggcggagccatccactgcatcacgcagcagcagcctgggccgaggaaggaggccccatgaacggaggggaaggcgtaacggtggatgtgattctgccgatggagaaggccggcgacgaccgcgcgcgccgcgccgccgtggcggaaaagctgggcatttccccctcccgcatcagggaattgcggctggtgaaggaatccattgactcccggcagaaaaacattttgttccagcttcgtctgctggcgggggtggatggccctctgcctccggaagaacctctttcccgggactatcctcccgtcaggcccggcgccccggtggcgctgattgtgggattcggacctgccggaatgttcgccgcgctccgctgcctggagctggggatgaaacccgtggttctggaacgggggaaggacgtctcctcccgccggtttgacctggcccccatcctgcggcagggcaccgtgatggaggattccaattactgctttggggaaggcggcgcgggaacgttctcggacggcaagctgtttacgcgcgcgaccaagcgcggccccgtgcgggaggtttatgaaattttcgtggcccacggcgcgccgcgggaaatcctgacggacgcccatccgcacatcggctccaacctgctgcccagcgtcgtgaaagccatccgggaatccatcctgagcgcgggcggggaaatccatttcaacgcgcgggtggagcatttgctccgttccgcggacggccgccgcatacgcggcgcggtctgtgcggatggccgggaatttgcggcggacgccgttctgctggctaccgggcacagcgcgcgggacgtgtaccgcatgatgctggcggaggggctggccctggaacagaagccctttgccgtgggcgtgcgcattgaacatccccaggcgttcgtggatgcccgccagtaccatctgcgcccggaccggaaacgcccggaacagcttccggcggcgcgctattccgtgacgaccaccattcgggaccgcggcgtccactccttctgcatgtgccccggaggcttcattgttcccgccgctacggaaaatgacgaggtggtggtcaacggcatgtccctggcccggcgggattccccgtttgccaacgccggctttgtggtcagcgtgcatccggaagatacggaatccttccgcagggagcacggcgtgctggcgggtgtggcgtaccagaaggcgctggagaccgcttccagccgcgccggcggaggcatgcagaaggccccggcccagaaagtggaggatttcctgaacgggcgcgtttcctcctccctgcttcccaccagctaccaccccggcattacatcccaccccctgcatgaactgcttccgggggaaatcgtctggcgcatgcgggaagggctgcggcagtttgaccataaatggcgcggttttgccggggcctccgcccagctcatcggctgcgagacgcgcaccagttcccccgtgcgcattccgcgggaccccgccacgctggagcatcccgggctggaagggctgtatccctgcggggaaggggccgggtatgccggcggcattgtttccgccgccctggacggccgccgctgcgcggaggccatggcgcggcagatgtcccgttgagggatgcggcgctccgtgaatcccttttcaagctttgccgtgcaaattccggcattcccgccgttggccttgtaaaaacagcctttcgttccggaaatgattggggcgtgcaagacggtagggaagcggctggaggaacggtattgccggaatgcatgtttgtggtatggtgtcttcatgggtaagatggttcgttttctgatcgttttaagtttatcgggaatggcggccgcccaggatattgctcctcccgccgtgccggacttgaaccgggatacggaggaaggaagggtgcgggaaaggaatcgtaaaaaaattcggagctttcttgcccagttgtgccttgtccggaaccttccttcctttgaagtaataatcagaggcggcaacggactggctacggaattttatcaggtaatcctggaggaattcccggaaaatgccctgaaacgctgtcctgcggattttcaggaactggtcgttgtaaaaaagagcaagatacaggaattcctggacgggcttgaaaagaatattgtctggccttacgtggcggatgaagaagtggccgccttgctgttcaagtacggcttgaaggatgaagaggaacggattgcacgctgggtaacttccaggctgggtttcaggaaaagtgacacccccgcgtttaaagcccggcgcatccgtgaactgaaagaggagatggaggccgggaaagtcgtggttcccgaaaatattggcgaggctgaggaaatggaggacggggaggtgatggaagatgtttgagaagaaagccgttatcttccgttttacctcctgcccggtggcggaatctgcccctggtggagcgaacgtgcggaaagccgtggaagggatggattgctttccgcggctcccattccgcaacgtggaggttttaagttttcccggtgaagacgtcccggaaacgtaaaatattaaaggaacaagggattaccgcagatttcgaacgatcgggaagccccgctgtccaaaagtgaaccatgagaatgcccctgaactttttattgctgtgccccgtgctgtttgcgctgtccggtgccgcccaggatgtcggggcgcccggaatgccgaatgtggatttggaaacgccttccgggcagaagctggcggcggagaaggcgactatccgcaaattcttcgtgctgctttatttagccgctctcctgccggtcgtggaaaaccagggcgaggtattcagggaaaaggatctttatcccctgatactggcggcttttcctgaacaggaattgaaggaatgcccgcaaaagctccaaaagctgatgaatgccagggttcaggctctgaaagaggcggcggacggaaaaagggatttgcagtccgagccgtttaatccggaagacccggaggttctggcctttctggcggaatacggcctggaggacatgtgccgccaggccttgaactggatggagcgggaagtcaacgcccgcggcagcatggaccaggactcgtttgcccaagcgttcaagcaatttcgcgatcatgtccgttcagggcgcctcgtcatgccggagacggtggaggaataagtccggtagttgttccgctccggcgtttttccggaagaaagggcaagcctgttgcggcggatgcccggaatccacggcatccggcgtatgggcggctgtgcgggaaggtccatgaatgggaaaagaagcggccccggcacggaatggcggaaaacttattgcccgcggacggtcccgtggtatgctgtgaatatggctggcatgagtcgctttttattgattgttttattattatgcggggcgttccctcttttctcccgtgctcaggatattgcttcaccgggaatgcctgtcgttgatttggattccgagaccgggaaaaaaattcaggaggagcgtgccgccatatgcggttttatggttgtactggttttgaatcagatgattttaatgctggaagaggatcctgcggagaaaatggatctgcaaaagagaataaaacatttttgggagttcattcccatgaacgcgcttgcccggtgtccggaagatttcagatgcgcagtacggcaatggaaggatacgtgtgagaaaaagatggaggagtctggagccgttcccggagacttggagatgggtgcgtgggaagacgtacgcctgctgatggaaaaatacatggtgcaggaggcgatacagccggtgatgggttggatgatgaagaaggcgggtatttctgccctggagatggaggatggcgccggcaaaaaggaaatgctcaaacgtcttaaaggaatcaaggaaaagctggaatccggagaagtggttattcctgcggaaatcatgcagaagcaggagggatagaagctgggcggcgagaggaggaagagcagtttttaccgggcagcccccctcgttgccttcagggcgtttgctgtggttgctgcggacctgcctgtctggttttccgcagtagcggacagggagaataatgttgaccgcatgtgaagggctcctgtaacgtggtttcatgttaagtctgttccggcgggtggtggtttctgcattcctgacggcgttccccgccatgtcccaggatgtggcggcgccttccatggcgaacgtggatttggagacggaggaagggaaggccctggaacggtatcagcaagccattgaccgggtggaaatgctgggatgcgttctgggaacgatgataaggctggagatgaaaggccgggagacacgggaaatcgtggccgccatgattgttcgcatgaactctgcgccgcctccccggatgctggagttgtgcccgcctgattaccggaaaacctttgaggcgtgcagggaagaatccgccagactgctggacaggatgaagacggaaaaaatggatgatgaacaattcgacaaggtttttaaggaatattgcaaccgatgcaatgaaatgaatgctcccatgatggaaaaataccgtttgagggaacgcagttctctttttttccggatgctggaaagcaaggtgataggattgaacagggaggagcgcatgaaggcgcttcaacgaatgaaggacgacctgattgccggaaagctgaaaaattcaggggaaaatgaaggaatggaagaagaaaccggattgataagatgatgctgaatgtagttttctgtgcagttctggcatgggcatgctggctgggaatggtgcgggggcaggatgttgcttttacgcaggaaccgtccgtgcgggaggcgcagagtgcggaggaaaaactgttcagggaccgggacgccattatccggctcatgatgtggagcatgctgtatctggagaaaagggcgccgctgctggaccggatgccgatggagggcgtgcaccgcgcttttttggaatcgtacatagccgttcccgtcagactggtggaggaatgtcccccggattaccgcaaggtgttttggctggtggatgccatgagcaaggcctttcttcagcgtatggaaaaagagaagctggcgggaaaggaattgatccgggagtacggcgtttatgttaaggcatgcaatgaattgctgcttcccgtcgtttcccggtatccgctttccgaaaggtttcagcaggtggaccgggagctcagaaggcagatgaaagcggccacagaccgggaagcgctcatcacggccctgatggagcagatggaggatgtggaacgcagtcttcctcctccggaaaaagaaggggctgtctctccggagaaaaagtgtggggagaaggaggaataaggatggactttatccccggcagatgctcttatcaactaatgatcaagctgattttagccgcaggcttggcgggctgctgcctgggaatggcgcaggggcaggatgtggcgtcaccctccatgccgaatgtggacaggtaccggcagacgccggaatttgcccgggaacgtgccgccgttgccaggtacatgtttttctggaccttgtgcgggcggattgccatcctggaatctgatattaagggaaatgttaatgcggggctgctttgcaagcggttgctgaacctgcttcctgaaaatatttcagccgggtgtccggagatgttccggaaagaatggatggagcatgtggaaaaaataaaagccgcgttgaatgaaaatcccgaatggatggagacgccgcaagggaaaaaggaatgtgctgcgatagaggctgtgatgaaacgcctggatgagcggtatggaatagaacgagcgatttatttgtccaatgaatggcttgataagcggttggagaccgggaaaaggaatgatgcccctgaaatattcctgaaggatttgctccggttgaagaaggactttgagtccgggaaactggctattcctgtggagtttatatcccaagagaggaaggaaggatgagaaggctgagcttgttgctgtttccggtgcgggaaagaaaaaaggttttcaccgctgaaaaggagatgaaattattcaaatggttttccctggcgggtatggcatggggatgcggttgtggcgtattgagcggacaggacgttgtggaaccgctcatgccgaatgtggatttggaagtgcagcagttcaggaaagcccgcgcggctatcctcaagtaccgtgtcatgcttgaattgtgctgtgaaattatttccctggaacggggaactccgtccggcgacaggagtaaaagcatgtttgacctcatgccggaacggtttgaggcggaatgtccgcctgatttccgggagtcgtatattgacgtcctgaagatggtggatgaatactggaagggagatttttcccggaaagacatatccgttgtgcagaatctcatggccagtctggacgaggccagggaacggtttgaccatcaatatgatttgggccgctccatgaatgcgttgattgactggctggaccgtgggacgatgaagagggagggggaaagcgcccctgaccttttgaagcgcctttaccagtggaaaaaggaccttgagtcaggcaaggcggttattccggaggatgcgggagacccttccggaagctccgggcagtggagacgcggaacaggggaagaggcggtttcacaggcagaccatgaaagagatgggtgaaatgggggaaaaggcgtgtgcccggtgaggccgttccggagttttggcgcctccgtccgggcatccttcacgcccgcggcccccgccgttttttttgaaggttaagtcttgccagggcagggggcttggggccataatctgcaagtttcacaaccgcacacacagccatgaaagtcatcgtcatctacggcagcccgaatgataagccctttatggaacccgcccgcgagtattttgctcaggagaatgttccgtatgaagaaaccgtcctgtccgcccaccgcgacctcccggagctggtcaagttcctgggtgagctggaagccagcggggaaaaggccgtcattctggctgtggccgggctgtccgccgcccttcccggcgtggtggtgatgagctgctcccttccggtcatcggcgtgcccgttcccggaggccccctgaacggcattgacgccctgctggcgatcgcccagtgcccgggcggagtgccctgcaccacggtgggcctgcacaagaagacccccgtcaacgccgccatggccgcccaccgcatcctgaagctggccggcctgtaacgttcactcctttcccatcagatgactcctcctccgtcacaggaaatcgtgttggacggcccggggatttcccgtgcgctggagcgcatggcccacggcatcgtggcccgctttcccggggaaccgctcgccatcgtcggcctgctcagccagggggacgtcatcgcccggaggctggtggacaaggtgaaggagctgggcgtggaagcccagtacggcgccattgacatttccctgtaccgggatgacattttcaagctggaggtccgcccctccctccgttcctccaacctgccgttttccacggatgacatgagggtggtgctggtggacgacgtcctctacacgggccgcaccgtgcgcgcggccctgaacgccctcttcgactacggccgcccggcccgcattgaactggcgtgcctgattgaccgcggagggcgggaagtgcccatccagccggattacacgggccatgtgctggaccacgccggagccaaggtcatcgtgagcatgaaggaggccgacggcgaggaccgcgtaatcatctcctcccactagacacttttcaatccattacccgttttccatgaatccccgcaaggaccttctcaacatctcctcgttgactgacgaggaaattcatacgctgctggattcggccggtccgatgaaggagctcttcaccaaaagcgttaaaaaggtgcctgccctgaaagggaagtccgttttgacgcttttttatgagcccagcacccgcacccgctcctcctttgaggtagcggcggaacgcctgtccgcggacgtgaccaacttcacggtgtccacctcttccgtggtgaagggggaatccgtgcaggacacgatcgccacgctccaggccatgaaggtggattacgtgatcgtgcgccattacaacagcggcctgccgaatgtgattgcgcgccatacctgcgccagcgtgatcaacgccggggacggggcccatgcccatccctcccaggcgctgctggactccttcaccatccgggaggtgtttccggaggtaaggggcaagcgcgtgctcatcgtgggggacatcctgcattcccgcgtggcgcgttccacctccctgctgatgaagaggctggggatggaagtggcctacctggggcccggctccctggtgccgcgcacggagcactccggcatcccgcgcttttccgatttcaatgaggcgttcgcctggaagccggacgtgatttacctgctgcgcgtgcagaaggagcggcaggacgcccccttcttccccagcgcccgggaatacaacaagatttacggcgtcacggaagaacgcctgaagcgcatttcagatgaaggcctgtatatcatgcaccccggcccggtcaaccgcggcgtggaaatctgcgacctggcgatggattatgagcgctgcctgatcaaccggcaggtggaaaacggcatcgcctgccgcatgtccatcctttaccatctcaccccgcaaacccagcactgattgctcatgaaaacttccgtacttattcgcaatgcccggacggcggacggttccgctccggtggatcttcttgtttccggaggggtaatcgccgcaaaggcccccgccgggacgctcccggaggatgccgcagaaaaggtgctggacgcctccggaaagctggttctgcccggcctgtttgaccttcacgcccacctgtgccagcccggccgtgaggacaaggaacgcgtggccacggctaccgcggccgccctgcatggcggcgtgaccggcctgatggccatgccggataccgatcccgtgatggacaatgccgcccagatcaccacgttcatggaaatatgccgcacggatgcgctggtggaggtcatcccctccggctgcctgaccaagggggacggcggggaagagcaggcctcctatgactccctgcgcgccaagggcgtgcgcttcatcacggacggggatcgcgcgccggacaacatgctgctgctgtaccgcgccatgcagtacgctagcaacctgaatcttaccttcgccctgcggggggacgtgccgtccctgacggccaaggccaccatgcacccgggcaccacctcctaccgcttgggattgacgggctctccctcctgcgcggaggaaataggaatggaaaccatcatccgcctttccgtggatacgggcaactccctgcatgtgcagaccgtttccaccgccggcagcgtggacatcctgcgccgctgcaagccggtgaccgccgggctgagcgcggaaacggcgctccaccacctcctcttcacgcatgaagacgtgggccgctacgataccagctacaagacgctcccgcccctgcgcgggcagtcggacgtggacgccctgatcgccgcggtgaatgacggcaccattgactgcatcgtctccgaccacacgccctgcacgccgttctccaagcttcaggacttcgtcgtcgcgccgcagggaatgattgcgctggatacgttcctgcccgccatttaccagtatctggtggaacccgggaaaatgtcctggcagacggtggcgcgcgcctgcagtgacgctccccgcaggctcatggggctggctcccgtttctttggaagaaagcgctccggccaatctggtggtgtttgacccggagggtgaaacgcccgtcacggatgaaacgctccgcagccgcgcccggaacacccctttcctgggcaaaaccctgaaagggaaggtggaagccgtagtgctcggtgaagaacttcacagtttttaacgttcactgttaactattaattattaactgttcatttgcttgcatcctgtcgcccgcgtcagcacgtgttatccggacaagttcggcgtaccgcgccagagcgggctggttccgggtgcgcgtgcgcggctggtatttgagccgccgttccgtcatccggatgccgtccgcggcctggaagggttttcccacctgtggctgatctgggtattcagtgaaaacgtaaacgagggatggagccctacggtccggcctccgcggctggggggcaacgtgcgcatgggcgtgttcgccacgcgcgcgccgttccgtcccaaccccatcggcctgtccgccgtcaggctggaaaaggtggaactgcacccgcaggatggcccggtgctgcacctttccggcgtggacctggtggacggcacgcccattctggacatcaagccatatgttccgctggcggactgcattccggaggcttcggaaggatttacggctgttccctatgaacggctggacgtggaaatccccgccgctcttggcggcaccatgaccccggaggaacggaaagcgctggcggatacgctggccctggacccgcgcccgcagtaccaggacgatccggaacgggtttacggcctcctgttttccggctgggaggtgaaattcagggtggaaggcagccggctgctggtgctggcccttcatgaaatcaaagctgggtgaagtacggcgcgggaggcatgatgcgagcagcatgccatcgctggaagggggaaatcgtatggaaaactgcttcttctcccgtgtctgatgcgctttttcttttgcctgcaactcctctcccttgatgccggagtggctggccccggaggactcaggaggctgcgccaggaggaagtggaagatgcaaggtaccggaaaactttccttctgccgcgttctatgggctcccgccctctgtttcaggggtctttttcaaggcagggccggggcttgctttacatgaccggggggagtaaccttccgcccggacttcggaggtagcgccggggtgtttaaggggatgaacaatgaccgtcagatagttgaagcgtttgaaaggaacttccgtgactacggggaactgggcgcctccgtttccgtctggaaggacggaaaggaaatcgtttcccttcattccgggtttgccgtagcggatgaaacgcgcccgtggacggaacactcgctggtgcccgtttactccgctaccaagggagcctcttccgccgccctgctgctggccctgcaccggcagggagcctcaccgcagatgagcatgggggaactgtggccggaattcccgctgccttacgcatccatcgcgcagatgatgtcccaccagtgcggcctggcggccttttcccggacggccagcgtgtttgaccatgaggactgcgtgcgcgccttggaggaaaccgttccggcgtggcagcccccggagcacggctaccatccgcatacctacggcgtgatgctggatgaactcatgctgcgcctgaccggggaacgcctgtggcgttactgggaggaatgcatccgtacgccgctggacctggacttttacatccgcctgccggaatccgaattcagccgggtggcgaccttgtaccccggcaagatggacatgtccaacatgggcacgccgttttatcaggaatacatgaaaaaaggcacgcccgtgaaccgcgcgttcaacaccctgacaggcctgaacagcgtgcgccagatgaacacgccggaagcgtggacgtccggagccccggcattcggtggcgtggcctccgcccgcggcatggcgcaattctaccaggcctgcctggggctggatgaattacggatattcccttccgctgtgcgcggctggatgcgggacattgttattgacggcccggacctgaccctgaaaacgcccaccgccttttcctgcggcttcatgcacgatcccgcggatcccgttacgggccgcaagctgcgccgcctgttcggttccggcggcttcgggcacgccggggcgggcggctcccacgcctttgcggacccggtccgcggcctctccttcggctacgcaatgaaccgcatggacctgaacgtgctgcccggcgtgaagacccggaaccttatcagtgcagtgatgaaggaaatggaggagaggctggaggcctgacctttctcccggaaagagccggagggcggaggaagaaaaaccgttcttcctgagtaggagggagattttccgtatgcgccgtctctttcaagtacggttgttttcgggagcctgcgccgctccctctccaatggtctcattgggtatccagccttcctcccggtcgcttgctctccggacccacgtccacccgttcagcgtcctgatcttgaggatatcttcccccgggtctacgtccaattccctggcgctgtaatcttccagcaccgttccccgcgttccgtctcccggaaagtcaatcaattgaacgggaacccatcctcctgtccctttactgttttccgcccatatccagtccttccagttttcctccggagctctttcccccagcgtaacgctttccccctttttcaatttgatgggatgttcatattccgtcctgtgtgaagctatcgttttaaaggttttcattattatatatgtgtgatgatctttttccgtatggtaatagagtcctattcgcgcctcagtggctgttacatgatttgacgggagcttgtgttcctgatgcggcggatatcaggttaatcttcatttgctttcacccatgccagtttccattcccggcccattccgtctttggcccttagggtgagtgttagtttcaaaggggataatgattttttgccgatttccatgaaaagagaattctcttccgttttggtggtgacggagtcggatgtccagagaatggataagacagacgtattttttatttccggaggaagatgagcggtttcattgggattgataaaatgcgtctccgtctcggcatattccctattttcagcggattgtctggattgggttctttcaataataagagttcctacttcagcagatagagagtcctgcgtttcctggtttttgaaatagagatggggaaactgggaagaaatatccggaacgaaatcgtcatctctatggtcggcacactcgcttttttcttccgttccagccttttgagaatcgaggcggatgctcttttcatgccagataatgctcccctcaacgagtgagacggcagcgaggagaacaatagtgatatttgtaagacggttattcatgcttctttcaaacaggggtgggatgatgaaaattccaatgctggtcattgttttccggcagcatgtcttgatgcattccggtatgtaaaagcgcatctcgctgcccatccgcaagggatagtgcagtgagatgcggtaatgacgttcaggaagtccatctggccgttgatgtacagggtgcgggagagaaggaaagcctctctgttggcgttgttttccttgtgcaggtattgcatctaggaggtgtagttgccgtaggcaatcagagcgtcttccaccttctccattaaggtgaggaagtattttgttgagtcccttttgctgtccagtagaacgtttttattataattcttgtcaatgccgcttccttttccatagcagctagatagaaaacattaagcggatgaagtcccttgatttgcttttaattcccagattcgctccaagggaatagacaagatttttcgattgaacaattttaagctggatttttctttccgcagtagaaaataacctatttttatctcttgaagaagcccgtttccaatttcattctttgacttccgattttaccagctttccctgtctattgatagaaaattcctgagaactccattttatggatgtaactttcaatcttttaccaatcaaatccttccaatttagaggattgaagaattttcgatcgtgcgcgtcagccgtatacttctgaaatccgtcacttcgaatgtacaaacgttctcccggcaacagaattttcctgtcttctttttttgtttccctgccagcttccccgatgattttttcatgattctccattacttccaccaaccgaaaattcatgtcaacgttcaaaggtcccgtatacccggttaaaggaacctgtaaggggtgatccgtctcattctttaaaacgactgacaaataaaattgaggggtccgcgacgattcatcagctacgatgccggtacattctaagattccctcatggccggttgtatccccataactttttatttccaaaattttggggattacaaatattcccgtcagccatgatatggtgcccagcatgttgtcgtcatgttcaacgttgcaatagcttttgatcatgtacgaaccacttgcaagaagtgaagaaggtacggcaaagaagatcatcatttttgtcttaggagcaatttcttcacgcaaacttattccgcaacgccctaatttttgctctggatagactcttacccactgttttccttctttccgaaaaagttcgaacgtctcaaaagatacatcggaaatggcaatatttgatgaagacacgttctccagaaaaaaaccgaggtacacttccccttcaaccttccttggaatcaagcgttcactccatacagaagagggcaaactctcaaaacaaccagcaaatgacgtttgtacccattgtagacttattgaggttcggtcatttcttatttcattctgaactgtccatgccccggcatgaataggaaaaaagagcattaaacagatgatttccagtatgaatttatttttcatcatttttcttatcttggtaaaagagcaccctcaacttgatccttcactatatttgcaatctcatcagaaatttctggataattcactcgtttccaagtatgaggagcatttggaccattgtcataagtttcttttgtgtttgctattgccgtattgtactgcttatccagaacagaaatagtacgcttagttgcattctctttgcaacttccataggtaaaaaaataaataatgccattactcaattcttcaacaattgcagttttcaattcctccccggctaaccaagctttaaaatctttcacatgatccatctccttactgtaaacccagtcatatggagcataaacactggaattcgtagcgccaacagatttgtaaacatagtcacttgaaattttaaaaaccatgccattctccgcaacaatattataatacgtcaaatcttccggctgattaatcacaataatcacactggcttggagagaaacactttttacttcacacgggcttgctttggcagcttttgccttaccacatataacagagattgatgcccggtttatttttacttgagtatttgcaaaaacgttgggatcagtagcttgaattttaaatatggaatcttctcccactccttctggaatgaatccagcaggcgtttctataacatttacttcatctgttccagtgacattaatatcatcctttgttagaagaagtcccaggaaatcccattcccaatgattgctgacaaatccataaagattacgtcctgcctgttcccgtatgggatccctgttgatccacctaccgtcgagcggattaagatggcgatagttgtagtagacaagccctaattcatcgtctgtgaactcgcaggaaaaacggaacttgttggattgtgccatgtctccgtccgctgtaagcagggcgccgaaaggagcatactcgtagcgggctcttcgcgttcgttggccgtcgaaaatggaagtcacgttttttcgagcatcgtgcatgaaataaaaattctcttccgttgtcactccccttttccatctggtcgtcatcaggacgcgtgtagccgtacgcaccgtcggatcccatacatgggttctcgtcagcatggcttccgagtgcatcagatccagctcagctatttgtaaatagcctcggtataaatagtaggaatgagaagaggtaactgcattgatagtgatttttttctcaaagcggcggccctggtagtcgtagccgcaggtgatggttgttctgccatcctggctggcgaagacgacggggcggtcgttggcgtcgtaggacacttcccatatgcccgttgaggtcctgatgcgggtctggttgccgtcggcatcgtagacggggttaaaatcttcttctcccccggcaatatccgtgtactggttgagccggttggattcataagctacttcttcctccagttcccgggctgttttgcggttgccgatgttgtcatagcagtacgcaaagcttcctccccggctgatgcggtcttccagcagttcactgcggctgttataggtaaaatctcttatcgtctcaggagtggtagcatcccacgagtcccgcagctggacgggacgcatcagcgcgtcgtactgatatttatgcccaacaactgtttcctcatttccctccatcttataaccgatagcggttacgaggttgagtgtgggatggtaggtgttttggcggaccatgccgttggggtaggtgagatggttgaggaagccgctggttggatcgtactgccaggtaaagggagaagcgatgccttccagattcatcccaataatgccacctttggaatcgtagtcaagatgggagtgctgcacggtgcgtgtgccgagcatcaggcggtatccgttggaacgcccctgggcatcgtattcttcttgaagagaactttccacctgtccaaaggaagtgtcctgaatcatcctgccgtagctgtcataggaaaattccctgagacccgaagcgtcatagacggagattatctgccctagatggttggatgaaaagatccagggagaagttccatcgctgtaggaaaccgagatgagttctcctgtaaagggagcatacttatacgttgtgacaagccccctggctttgacaagtgtctcctgacggttgagctcgtcataggttctggaaacacaggaaccgtcggcataagtctttttcaattccagccccgtggcctcgtcatagagccaggtggtggtgtctccgtcggttcggccggaaggatcggaagtgatgtcgccttcgtttgcacggaaggtagtcagggccactatgcggtcggcttcgtcgtaggcgaagcaggccggctgaatggcggtgccatattcggctgtctttctgccgcggatgtcataggaatagcaggtcgttcccaccagggcatcggtgatacaggcgggattgtcacagcagggcaggtagttgttggtggtcacgttgcctgcagaatcggtgactttgacagtacgtcccgcaaggtcggtttccgtggtggtgacattgcctctggcgtccgtgtgcttgagaaccatgcccgtggaggcgtaggaacgggtttgtgaagaacggattccagcgtgatcggtctggctggtctcaaaaccgtccacgaccagtgattcagctgtgatctccgaagtgggaatgcggctgaaccaagtgcgcctggttggagaggtgtactccgtccactggatgctctgctggccgtagacgtccgtggtgatggatttgttttccagtacagcgctgagtctggaaaccatgttttccgtggtctgggtgagggggaatccgtcggcgttgcaggtggtggaagtctgcacctggtagacgccgtcttcccgaacccggtaacaggaggaactttccgatatcctgtttctggtggtgtcattgggatgaagttcatccagaagaacggtctgcttcacggcttgccccagttcgttgtaatccgtgagggtaggagcaagatcctccgtttgagagcggaccgattgtcctttgtcgttgtagaagttcctggtgacgataaagccgcccctggtattgggatgttcctgccggacggtttgaccaaagccatttttcagaatccgcgacagcacaactcccttggacaaggtcgtggtcaggatgccttcttcgctcaactccagcttggtctccacttctctttgccccgttcctccctgccagagtatggttccatcatagtactttttggtaatcagcgtagcgcctgccggggtggtggtggtagtggtgagtccgtcttcgccgtacccggttcgggtggtgcgtcccagcatgtccgtggaagaaatcacccgccccagatcgtcgtactccgtgctttccgtcgccgtcatgggacccacgtcacgccgcgtggcgatcgtccttcccgccgcatccttcgtgtaggagataatcgtttcgggcgtggtttccgtcgcagcccgaatagtctccaccagctgcttggccgagttgtagccgtagccggtggtgatgccgtcttcgtcggtttccctcaacgggccgcagcacatccactccgtcgtgctggtcctgccgttgcccttggtcgtcttgatgagcctctgctcgtcgtcgtattcgtagtcctccgaggcaatcagcgaccagtcctctccggtgtgaacgtattgttctctcctggtggtggcgccgttttcagcgatgtattccacgtttcgggtgctttgtcccggaacgatgcttccgttggcctgcacggtctccgtcacctggtgaatggctccgtattccgcggcggcttcgtaagtataaacggtttgcaccccgtcaatactctggctcatcttttgcctgccccgggcgtagggatattcggctccttccccataagtctcttctacactcgtatgaacctggtcgcttcccagcgcggtttccgtgaccgtggtgcggttcacctgcgggctgtcttcataggtgtaagtgcgtttgagaagcgccgtttccgtcccgtcctcggcaatgattacttcagtttccgtggcgggtctgaagtcgttaaagcgtaagtcggcgtaagtcgtgcgtgttcccttttcaccgcctccggcccagggagaggcctgcagcactactcgtccctgctcgtcgtactcgtagcgcgtatagccgccattgggcttgagttccagggacatccggaactggtcgttgtaggtatagagggtggtccgggccagaggggtcttgtatccctccgtccggctgatggtcagccagccgccgtcggtatacttcttcactgtccgggtacaggaggcgggcgcttcctcgttgatgccctggatggtttcaatgcgctcccacttggagtcggtcaatgcattgcgttcaatggtgcgaacgatgcgctcctctccctcccccttgacgatggtcaccttgttgccttcctcgcggcgttcgatgaaatgcggctcctgaccggcgcgccggttggtgatatgggtgaccttgactccgttttcaagcgaggtttcatagacggccgtcttgtagggctctccggcaacggtgaacccgccttccccgtccgggatggtcttgccgggagcataccactccagggtgagcctgtcgccttcgggaatgcttctcatcaacccctgggcgcgggaataaacgctggcaagggagccgttttgatggtaagtgacctggaccttgctgaagtactcctcggcagagatcacatggcccgaagagctggtgaccgacacgacctctccggtggctgccgagaagcgcaggaccatgccgccgggaagaaccatgtccatgaaggcgggagtaccctggaggttgggagtaagatcttcgttgagaagcctcacacggtagttgaccttcctggaagagccgatgggagaagcatcgctgcttccctcgttagctttgaaatagagatggcttccggaggggcgcttgacggtgacgcggcgctcgtcagccgagaaggaagcgctccaggccatggggtggttgtagcgcatggaaaagccgctggaagccggggcattagtggtggcagagcgtgccgtcctgatgaacttggcgggagccggaggcgtgggtcctgccggggaggaagggttgatgcaggcgttgccctggcaatcctgctctccctcgggatcccccggagtgggctgtgtctggacacagtgttcgtccccttcctcattgcactcacattcacaggggcagggttcctcttcctggtccggctcgctggacgaggaggaaagggaacttgaactgctgctggaagatgagcttgagctcgaagaacttgatgacgaagagctgctgctggaagacgagctggaagaagacgatgaactcgaactgctcgaggaggagctggaagacggagcgctgctggaagaatccggctcctggggcggcaaggaactgctgtggaaactggaagacgaccagttgctggaagaagatgacgaggaagaactcgaactgctggaagacgacgaactggaagaagaaggcggcgcgctgctggaggaatccggaggctcgggagccgaagaactctgcagggagctggaagacgaactgttggaggaggaagagctcgaactgctggaagaagaactcgagctgctgctgggcttgggatcaaactcaaacgaatctcctccccctgccgaactgctcgacgaatctccttcttccacctcctggtacaggttgaccagagtcaggacggtttctccttccttgccggcaggcgtgttttccgccagcaggtaatagtccaggtcgggctcgccttccttgtcgcttaccagggcaatgcagaactcctgctgggagttcggggctggctggtgctggtgaacaatgtggcaccagtagtatccctggtcgaactggatctggcggcgcagaggggtggaagagcccggctccgtggagagttccagatccttggcgggaatggaaagggagatggaggagtgggcgtggaggtggagaaaacaggtggcgggagccatgaccttgaggtatccgaaccattcgtgccgggtaggggaggaagcggcgcgtttggggataaggacaggagcggagaggccgttgaccaggaagttgccctggggctgtccgttggggtacatgggaatgaagggatagacggtgtccatggcgccgatgttgaaagtgttgttcatggtaatgaaggtaaaattattaaatggttgcggttaccatgagaacaaaaaccagcaaagtaaacacgccggagacgtcaaaaatattaccgtcttttcctgagatagtaatcacactcctaaaaacaggcagaagagatgacaaatctcttctgcctggcatttcatcaattaataacaaggacagtgattgtctgattgttggttgccggacttcaaccgattttgatgtgcttcggtattctttttacctgttgctgaacattcttgcttccattctcatttcacagaatccaggtacagtttacagttgcatgaggcatccgtatcaaatgattttattattttccccttttgatttattttctgtagaaatggagaagcaaggagcttcaaacctatgggccaagaggttcatcataatttcatttggtagctgaatttaccgggaaccggaaagttttacaggatcaatgaatgcgaaaacaagaatctgacccgaaagatcggcaattctcaatttattcaacaatcagagtcccgtttttcagaaatggaaattcttgcctacttaatggagcaggttttaccatccgccgcccagggcgcgagcgagctgcacgacggctttgcggatgttctgcttcatggtgaccaaggattcctcggagctgagccaggagcgctgcgcggtgatgacgttcaggaagtccgtctggccgttgatgtacagggtgcgggagagaaggaaggcttctctgttggcgttgttttccttgtgcaggtattgcatctgggaggtgtagttgccgtaggcgatcagggcgtcctccacctcggagacggcggtgatgagcgtcttgcggtaggtttccgcggcttgttccgccgcggctttctgggcgcgcaccgtggctctcagggctccgccctggaacaggggctggagcaggttgccgcccagggaccacgcgttgttgttttcccggaagagctggccgaagtctccgccgcggctggagagggatcccgtcaggctgaagcgggggtacaggtccgccacggctacgcctacgttggctacggccacgtgcaggtccgcttcagcggcgatgacgtcgggcctgcgccgcaggagttcggaggggaggccgaccggcacgacgggcgttttttcaaagacggaggctttggggagcgtcagctccacgcgggagttgtacgtgcccagcagcacagagagctggtttttggcggaggccacctgtgcttccagcgccgggatgcggctttccgtggaggcgacggtggaggtggcctgttccacgtccaggcggggggcgaattccgatttgtagcgtttttccgcaatggtgagggtgttgcgttggatttccagctgttcccgggcgatgcggagctgttcgcaggcggtgatccagtcaaagtaggccgtggcgacgtccgccagcagggccgtgcgcacggcgcccgcggaggcttccgtagacatgagggaggcgcggtaggcctcaatggaacgccggttgccgccgaagaggtccagctcccaggaggtggacgcccccagggtgaagtcctgggaggtggagctgcggaagccccggtccggggacaggctccagccggcgctggcatccgcggagggcagcagggaggcctgggagacgcggagcctttccctggcttcccggatgcggagcagggctaccttcatatccggattgttgttgagggaggcggagaccaggcggttgagctgggggtccccgaagatgttccaccaggagcgcaggtccttgtcagagctgcgggggggcctgctctccgcccaggcggcggggaggtcgttggccggcggccggaagtccgggcctaccatacaggagctcaggcagcatgcggccaggagagggagatgtttgaacatggatgacatgggaaaggaagaagtaaggtgttattcgtgtcgcagggcgtcgatggggtccatcttggacgccttccaggacgggtaccatccgaaggccaggccgatgaacacggagacgcccaccgccagggccatggcttccggggaggaggcggtggcccagttcatggtgcggctgacgatgatggagatggccttgccgagcgcgatgcccagcgcgccgcccaccacgcagagcagaaccgcttccagcaggaactggcgcatgatgtcctgcggacgggcgcccaccgccatgcgcaggccgatttccttggtgcgctccgtgacggagacgagcatgatgttcatgatgcccacgccgcctacgaccagggagatcatggccacgatcatcagcaggttggtcattacctccgtggtgctgctcatggcgcgggacatttcagccatgtcccatacccggaagtcgtccagctggccgtccttgaggttgtgcttggcgcggatgacttccgtgatctggtcgatcgcctcggaggagcgctccgggtccgcaatctgcgccatgatggagtcaatgttgttgaagcgccgcgggtggggggcgtccgtgtagggctggtccgtggtttccgtgtagtaatccacggaattggcggtgtatttgtccgcccggttgaaggtggtggtggatttgccggaggaagtggaggcggaaccgccgcccaggccctggaggcggtagcggatgctcgtccagggcaggatgatggagtcgtcctggtcgcggcccatcatgttggcgccctttttctggaggatgccgatgaccttgaacatgacgttcttgatgcggatgtccttgcccagcgggtcttcatccccgaagagctccctggctaccgtctggccgatgacgcacacgcgcctggcctgctccacgtcttcctcggagaagggctggccgcggtccatgtcataccagctcttgattttcaggtattccacggatccgccttccacggtttccgggctccagttcttgttgccgtaaatgacttggccgctggcgcgcactacgggcgtggcacgcaggaccatggggcagtccttcgcgatggcctcgcagtccgcgttggtcagggaggcccggccgcctgcgccggtattgacgccgctcttggagatggcgccggggcggatgttcagcgtatccgcccccatggaggcgatggtgtttttaatctggagcgtggacccctggccgatttccaccatggcgatcaccgctgcaatgccgatgatgatgcccaggatggtgagcgccgcgcgcatggggttgcgcaccagggccttgatgcaggttttaaggagaggaaggaatttcatacgtcgtccttgcttagcgtgtcggaaatcccttcgcagatgaggccgtccgccatgttgatggcccggtccgtgaaggcggctattttggggtcgtgcgtcaccaggatgaccgtgattccctggcggcggttcaggtccttgaacatgtgcagcacttccttggaggtggtggagtccaggttccccgtgggttcgtccgccagcaggatgctggggttgttgatgagggagcgggcgatggctacgcgctgctgctggccgccggagagctgggccggggtgtggtccatgcggtcggaaaggcccaccaggttcagcagctccaccgaacgttcgcgcatggctttcatgctgagggtggggtgggcgtacacggcgggcatcatcacgttttccagggcggtggtgcgggagagcaggttgaagttctggaagacgaagccgatgcgcttgttccggagcgtggcgcgctctgcggcgttgaatttggctacgtcttccccggcgatgtagtaatggccggaggtggggcggtccaggcagcccaggatgttcatcaaggtggactttccggaaccggaagcccccgtgagggagacgaattccccctccttgatgtccagggtgatgcccttgagcacttgaaggtctatttcccccaggtggtacaccttggttatgtcacgtaagcggatcacgttgttgtagtgcttgaagcggtaaaaaggaatggttgagcgggtggatggaggcgtttccccggatcagggaggcgggggcgggccgccgttgccggaggcggagggagccttcgtgttgcccgtgctcggcttgcggcgcggcggcatcttgggcgcgaacggattttccccgccggcggaggcggaagctccgtcctccgagttgccggagcggttcagtatctgcgccgtggagacgatttccatgccttcccggagcgtttctcccgtgatggccgtcagcatgccgttgctttcccccctggtgaccaggtgggggtaaagaagattgtcccgcagttcccagaccacggcttttttcttctggccgttttgggcgggagcggccagttccggctgcatccgttcaaaggccgccttctgctcggcgctgaccaattccgtttccggacggaagcggagcgcggcgttggagacgaggaaggcgtcccggatgtcctccaccacgaattgaacgtttgccgtcaggtaggggatgaggagcttgtccgggttgggcacgtcaatgtccacgatgtaggtgaccacgttggaggtcatggtggcgtccagacgtatcttgtccactgttcccttgaatttgcggccggagaaggcgtccacggtgaacaggacttcctgccccttgcggatgctgccgatgtccgcctcattcacggcggcccagattttcagcttggaaaggtccgtggcaatgtaaaacaggctggaggcgctcatgctggaaaccaccgtctggcctatgttgaccaggcgcttgaccaccacgccgtccaccggggactggatggtggtgtattccaggttgcgcatttccttcttaagcgcggcttccgcctgtttcagggaggcttccgcttcctgcagggaggcttccgccacggccacgttggcgcgtgcggtctcttcatccgcaatgtactggtcgtagctggacttggaaagggcatcccctggccccagcttttccgcgcgttcgcggtccagcctggcttgctggtgcttggccttggcctgctggatgtccgccttggcgcgggcgattccggcgatggcctgcgccttggaagcttccgcacgctgaacgtccagctgcacgggcagcttgtcaatttccgcgagcatctggcccgccttcaccgggctggaataatccaccaccttgccgtccagatccttgccgaactccatgatgatgccgctgacctgggcgcccacgtccaccagttcatcaggttccgtgacgccggtcgcgtcaatggtgatcatcaggtcccccttctcaagaggctctgtctggtagtccacctggatcgcttcgttccccttccactgttcccaggcgaaccagatgcctccgagaacggcaatgacgatgatgagtttgatgaatcccttcacgactataatatacttcgcaataatgaaaaagttgcacagatgttaaaaactttttcgcaacagggcgtgatcctaccatgatttccggaaatgtctaagggtttattttgttcgttaacagttgttatttataaactaacaatattacattatcgtaatgggctgtcccttttttacggatttgtaagaatatggaggaaggccgtttccggaatggccccaggaatgaattgataaccatcgtgtttcatccatgggtaaaaattggcacgcttcttgctggatacaagatgaaggatcgcacgatccggaaacaaccaatcaaccatatgtacaagaacgatttatttgacctgatgttcaggctgcttcattccttctgccgctcctcccggccgccccggaaggagaaggagcgggagcggaaggcccggaaatatttgaaggccatggtggcgaacgcgcgcatgcgttccttttaagcgcgcgtgcgctttctgccaggaaatgccgtggggcgcagaggtgcgggaaaaagcaataaaagcagccgtgccggaatgctttgattccggtgcggattcaagagggggccatcgggaaaacaggccccggcggggttcccggctgcaagggaaagagaaagacaccgctgcaccgtctctggctgtgagccacgttcccgtgcctcaatagagcggggacttccgccgctgttttgacttttccggtataggacgtagtcagccctgcgtcggggctgcccccattaggttgtaatatcggttcgggccactttgccaggtaatgacgagtgcagcagccaccaccttatataccccagaagggggaatgatccaaggtgtttttggaatcttttcagacatgcgcaggcaatcctccgcggagtggttgaagctgaacgggctgccgttttgtcagcggttttcttccatccactgccttaaaacggggaggtctgcgggagcccagggcagtttttccagcatgcggccggagaagaagcccaggctttcgtgttccaggggccggggcagggcgcagggctccagacggcacaggaaggggatgaggcggatgatgcgctcccgttcccggtgccggacgggggtgagcatgcggacgggatggacggcgcatcccagttcctcccgtatttcccggatgatggcgtcccgggcgttctctccgggttccacctttccgccggggaattcataaagaagcccgttggactgccccgctttcttttttgcccccaggagaagggttccttgtgcggagggcagttcaatcagggcgcagcagacgtccaggatgttcatcatgcgttgaaatccagagaatgcaggttcatgatgcgggaatccgtgtccagaatgccgaagccgatgcggccggtcctgccctggagttcccccggattggccagcaggcacccgcggtacatttcccgcacggcctggtgggtgtggccgtacagggcggcgtccacactgccgctgcgcgcttcctgcatggcgtatttgggatagtgggagagggagaacttcatgccgtacctggtgagcaggacgtgttccgggtgcaggcgcgccgccggggagcaggcggccagttggcgcatgatggcaagctcgtagtcgttgttgcccggaacggcgtccagagggaggccccccgtcagttcaatcaggcgctggaagctctccggggtggtgcagtcgcccaggaacatgaaatgtccgcagtccagcaggcgcatctggcgcatcgcaagctccaggtggtccgtgcggtcgtgcatgtcggaaaaaacgcctatcttcatggtgttggtcggttcatggcatggatgggccaggccttcaattcgtccggcaggggaggcaggggcgcatgctctccctcccggcgcagcaggcaggtaaagccgcctgcgcccgcgccgtgaaaaggcatgagccggtagcaggcctcctgagtcagggcggaacggaaaggctccagctccggcacggctgcggttcgcaggtccggacagcgtttcagcaggtacaggacgttccgttcgttctcctccggggcgtaagtgcatgtggtgtacagcagatagcctccgggcgtcaggcactggagggccgccagcagaatgccccgctgccgcttggcgttgcccccggtgacggaggggttgaagcagccggggttgggaatgcccttggccagcagggattgaccgctgcacggggcgtccgccagaatgaggtcaaagcagcccggggccagctccgcccactggtccgggcgcagacgctgggtatatacgccggtgaagccgcagcgcagcaggttgtggcgcaggatgcccaggcgcttcgggtgcacctcgttggagacgtgctcccgcggggcgatccgcgtctgggccagaatgcttttcccgccgggagccgcgcacatgtccaggcagcgttctggccggaacggcagatgcgccagcggagccgtctcccagacggaagagaggtccaggggatagtaatagccgcgttcgtagtccggcagggagccgggtctggcctccgcctctccagccgagatcgccaggatggaagggtggccccagtcccgcggcgtttcctccgccggcaggggcggcaggtagccttccggagctttcggggtgatgaccagcgcgcttctggaacggtcccctgcctgcatggcgtccagaaaatcctgctcctgttccgctgtcagctccagcttgcgggtgagcctcagtatttgggaggtggacacgagatcaggcccggaacgtttcgccgaaatgggtgttgagcgccagatgggcggaccccaggatacccgcctccgtgccgaactgggcggggaggatttcaagatgctccaccagcggagcggcaagctgggtcttcatgatctcctgaaggggctggaagagcagggtcttggccttggccacgccgccgccgatgatgatggcctccgggttcaggaggtagcagcagttcatcagcgcgcaggagagctttacggccaggtcgcgccagacctgcgcggctacttcatcccccgccagcgcggcccgttccagggcgatggggttgcagtccacaatggccttgtcaacgccgtggctggcgtacagggtgcgggcgtccgccgctatttcccggttgcccacgtaatcctccagggaaccgcggttgccgtaatggcccagccgcccccggtagtcgatgctggtctggcccagttccccggcggagcaggtggccccgcgcaggagctccccgttcacgatgagtccgctgcccacgccggtgcccagggtcaggcagaccaggtgccttttcccctttccggctcccagcttccactccgcgtaggccatgcagttggcgtcgttctccacgtacacgggcagtccgcaggcggcctggagcatgtcccttaccggaacgttgttccagccgggcacgttggtgagcgtataaacggtgccctggtaaaaattgacgaagccgggcatccccatgccgatggcctgcacttccggatggttcagccgcagcatgttcacgaactgggcgatggcttcaatcagttggtcgggattgccgtattcctgggtggcgatggaaggcgcgtgcgcgatcacttccgtgcctttgacgacccccagcttgatggaggtgcccccgaagtcaatgccgatggagggaatggttgaagctgtcatatggtaccaatatagaattttgccgggcgttgaaaaggttaaaagaagtatgcttccgttaaaaaaacggcaggcggggcagcgggaaaaatgacttgtttcatagctgaattttcttgaatgaacatttgagcgcttgtagtgtctcatagtctagtcagttgggcggtttcgcccgctgttcgtgaaacatcgtcaacctcagcccatagagacacctcctatgcctactcccaagaaaaccgatagcaagaccgtcgccaaggaagctccggcccccaagaaaaagacctgcgggaagtccgcctgcaagaccgctgtagagcaggaggcgcccgccaggaaaaagtgctgcaggaaaaaggccgctgaaccggaaaaagccgccaagcccgccaaaaaggccgctgcccccgcggctgctgtggaaaagaagacggaaccgaaaacggcccggaaggccccggccagaaaaaccgcttcctcccccgccgccccggctcccgctgccgcaaagaatgaattgacggatgagcagacggaagccatcgccgccgccaaggctgaactggccgccaatccggaatgggaaccctttgtgcagatgcagcgccagcacctgatggacctgcgcgacagggccctggacaacatgagcggcgtggcccgcgacaccctccggaaccatccggaaggcagtgaagcctccggctccggggaacaccaggcggatgccgggagcgacgcctatgaccgcgactttgcgctcagcctgctttccaaggaacaggacggcctgtatgagattgaacaggcgctcgcccgcattgacaacggaacgtacggcatctgtgaaatgtcatacaaggtcattcccatcttgcggctggaggccattcctttcgcgcggctcacggtggaatgccaggcccagtgggaaaaggaaaaagggcagaacgcccggttccgccccagagtggccctgggctttgcgggaggacaaaatgatgtagatttatctgtttctcttgacgatgacgaagaatagtgtataaatcctcccccgtaacacattttcatcatgccaagagacatcatcatcctcgaatgcaccgaggctaaagccgaaggaaagcctacgtcccgctacgtcaccacgcgcaacaagaagagcctgcgtacccccggccgcctggaaaaggttaagtacaatcctttcctgaagcgccgcacgcttcatcgtgaaatgcgttaaccgcggtccagctcatcgattatctttattactatgtccactgaacccaagactgtagaacgtcgtattcgtttccgcacgtgcaatcgccagatgccgcgccgccgtctcgacatcccgatggatcaggtcgatctgctcaaccccgatttcctgtccaagttcacctctgaaaccggcaagattcttccccgccgcgtgaccgggctgtccgccaagatgcaccgcaaggtgacccgtgaaatcaagcgggcccgttccatcaaccttctgccgtaacaagccccaaggaaatctctttcggtagaaattgtctttgcaggcgggagtttgtccggtaacagggcagactcccgctttatttccagccaacatcctccttccgcatgcaggaactgaaagatacccagtccgagacggatacgcgcaatatctccattgaccgggtgggcgtcaaggggctgcgctttcccatccagatccaggacaagctcaaccgcatccagtccaccgtggcgacggtttccctggcggtggacctgccggaggaattcaagggcacgcacatgagccgctttgtggaggccctgcaccagcacggccccctgctggacgtgcatacggccctggccattccccgggaactgctccgccgcctgtccgcgcgccgctcccatgtggaaatggagtttccgttcttccgcgccaaaaacgcccccgtaaccggaattgaagggctcatggactacgtggtccggtttgagatggaggcggaagcggacaacaagctggcggacttcaagctgacggtggtcgtcccggtgacgacgctctgcccctgttccaaggccatgagcgcctatggggcccacaaccagcgcgggctggtcacctactccgtgcgcttcgcctcccggcccgtctggattgaagacctgattgacctggtggaatcctgcgccagctgttccctgtacagcgtgctgaaaaggcctgatgaaaaatgggtgacggaaaaggcttatgaaaaccccgtctttgtggaagacttggtgcgcaacgtggcgctgaaaacgcagagccactccgctttcagctggtaccgggtggaggcggaaaactttgaatccatccacaaccaccaggcgtatgccgtcattgaacgggacctgcgttcctgagctgctttccgtacaggacttatgaacgacaactggtgggccattgcatctctcgtcctgtccctggcttttacggggcttggctggcgcctgctggcctccggccgccggtttttatacgcccacctctggatggcgtgcctctttgcgctccagacgggggcgctttgcgtcaaggcgtaccagacggggatgtgccccatccgcggcgcgtcggaggtgctcttcttcctctcctggaccatcaacctcttttatcttcttctggggcgcgcctaccgcatgtccgtgctgggcatcttcaccgctccggccattgccgtgctgacggcgctttccctgctgatcggcctgtacggcgcggatgtgcagggcacgcatgacttctgggtgacggcgcacgtgggcgtagccatgatgtcctacggagccggaggcctggccgccgctgcgggcgtggcgttctgcatgcagaacgaatgcctcaaaaggcggcagatacccggcacctgccgtcttctgccccctatccgcacgctggaagccagcatgaagcgcctggttctggtggcgttcctcctgcttctggccggggaatggctcggctggcagaggcatctccccatcaacggggccaaaacctccatcgtcattctgctgacgctgggctatagcattctgctgtggttcatctaccgccgcggcatgccggggcgcgccctggcctactgctgtgtggccctctttattgcatccatgagcattttcctggtaagctgatgagaatggtttgtttaggcttgaatcaccggaccgctcccgtggaaatacgggagcgctttgccgtgccgtcccacaggctccaggaggaggggcggcgcatccgctccctgccggacgtggaccagtgcgtggtgctttccacctgcaaccgcatggaaatctactactggtctgacaggccggaaagcgcgcaggaacacatcctgtcccacttcctgggagcgggccgcgggaacgtggacatggcctcccacttttacagccatctgggggcggatgccctggagcacctgtgccgcgtcctgagcgggctggactccatggtgctgggggaaacggaaatcttcgggcaggtgaagacggcctaccagatggcgctggacgccggagtgaccgcggcctgcgccaacaagaccttccagaaagccttcaccatcggcaagagggtgcggacggacagccagattcacgccggagccacctccgtggggtccgtggccgtggagctggcggaacaaatcttcggcgacctttccggcacccgcgtcctcatcctgggagccggggagatgagccgcgtcacgggccgcgccctgcacgcccgcggggcggagggcatctatgtagccaaccgttcctttgaccgggcggtggaactggcgggcatgatcggcggccaggccatccggtacgacgtgtggggggactacctcagggacattgacgtggtggtggccgccaccgccgccccccactgcatcatcacccgggagacgctgctgccgctgcgcgcgccccgcaagtaccgctccctcttcctgattgacatctccgtgccgcgcaacatctctccggacgtggcggatattgacgaggtgtacctctacgatatcgacaccctcacccagctggcggatgaagccaagcgcagccgggagcaggaagtctcccggtgcgaggccatcatccaggacaacatctccaaatactttccggactccgcgctttatgaccagtaaaaacacccttatcatcggcacccgcgggagcgccctggcgctggcccaggcggacatggtccgggccgccctctccctccgttatccggaactggacgtgcgccgggaaatcatccataccaccggggaccgccgcacggacgtgccgctggcggacgtggcccgcgtttccggcatcgtggacaagggaatcttcatcaaggaactggaaaccgccctcctggaaggccgcattgacgtggcggtgcacagcctcaaggacgtgcccagcgagctggcccccggtttcacgctggccgccgtgctgccccgcgccgccgtagaagacgtgctcattacgagggagccggactggaacggctccggcacgctggctaccggaagcgtgcgccgccgcctgatggcgcgcacgtactggggttccggcctccggtttgaagacctgcggggcaacgtgcccacgcgcctggcgaagctggcggagcatcccggctgggacgccgtaattctggccagggccggactggaacgcctggggctgtatgcgccggaaaccctcgtggaggggaggaagctctacatgcgccccctgccggtggaagccttcattcccgccgtggggcagggcatcgtgggcatggaatgccgctcttccgaccgggagacgatggaaatgctggcaggagtcagcgatccggaagccttcgcctgcgctctggcggaacgcgccttcctggtgcgcctgggagcgagctgttccacgcccgtgggcgtttacgcccgtttggaagggcatgaactggtcctgcgtgcggcgtactacgcgccaggcagggaagaaccttttgccgtggtggtccgcggggaccggaaggagcccggggtcctcggccttcgtgcgtttgaagaattggacctgcgctgacggggtgcgctcttccgctttttccggagcggacagggataaaaaaaggttccggaccaagtccggaacctgaattaagcagagagctcacggggaattaatgtttttccttggagcttgagcctttatcgctcataaactgcccggttgaagcatcgcgcttgacgcgctgcccggttttgttcgtggtggtttcggagcgcttcttggaagaaccgcctttgtgatttccacccatgtgggaactacttgccatgttgtttcacctcctttccattttcttcgcctgttcatgaacgagagaagaaatccggccatatcataggtccctgtgacagcatttgggcctgtaaacggcgcttgttcaaaaatgcgcgcctgcttatgaagaagaccgctgcataagataatccctcagggccgccgcttcattgtgctccgtatttctggcggagtacagcaatgtaagcttccctttccgcgcgagctggagcagatgggaaacggcctccttgttcccgtccagttcctcgtcatacttccggcggaaggcgtcccatttggccggatcatgcgcaaaccactggcggagcgccgtggacggagccacatttttcagccattcatcccaggaagccttttccttggaaatcccgcggggccagagacggtccaccagcacgcggtagccgtctccggtttccttcgggtcataaattcgtttgatggttatattcatacgaaaaaaatctgatgaaggaatagagcgggcaacgcttgcttttgttgagctgcgtcgggacatgcgccgcccgatgccgtgaatggaaacggcccggggagggggaaaacggaaaaaaaacggccccgttccggagacggaacggggccgggaggcatgtagctgaagacgcttaaaatcccagcataacgcctgtacggccttgttgtgccaactgtcggcttttcatctttctggctgcagtacgctctgtgttccgtggatgaataagctgacgcggaatccggtaaaaaagaaaccggataaagggagttgcggttagggattagcgcaaaaaactgatttttaaccgatttttttcgggcggcaacagaagtaaagaccacgccaaaggataaaaccttgagtgtggactttttctgtttgtactatgcagcaatccatccatagccttggattgccatatctataaagtgattgagcaaaaggttggttttggcatcaaaggaatccttgtcatagctatccggcaaatcctcattcaaggcatactcaatggcggatttcaccttcattcttggttggtcatccttgtaccagtccacaacgagcaattcggttttctcctctgtcagtttcttgaacagatttttcgcagccagtttgactttttgctcctcttcctgtgtcagttttttaccacggacgagcaggtcataaacttccagttcctcttcggacaggccttccgccttggggcgctcctgctccttctgcatttcctcaagcagttttacaagctgctcgtaataatcctcattttccgagccacctgcgttataacggtcaataatgcccttaaaccgctgtgaaaacttctgacgggtacagttccggctgatcatcttctgcaaagccgtttctatgaatgccttgaggtcatcaatttccactgctttataaacggctttcttgatttctgcccgcagttcatccacattgattttggagaggtcaatcaccttcgtgccgtggatggcatattccctctgcttgtcctccgccgtagcagaggtaacgctgctgtcaaggacggtagccatgcgatttctggcacgttggattttctcatcatcaatcttgttatgcagcaggccgtggatataggcaaggggtgagaatttctcattatcccaatggcgctcaaagatttccggcttggatgcttcgtataggttaatcatcttatttgtgataaccttaaatttatccttgctttcgtcatttgcgaccactgtatcgtatgcactgcggaaggcatcaagtttatcgaatgtactgctttccccaagaatgctgtccagggacacgccaagcgtctgcaaaaatgcatctccctcattaatgcaggagttgagcagatcaatcagttcatccacatttttcgctggcataagagtttcatcatcgggaacggcataatcggaaagtgcctttttcatgtacttaaacacattcacatagtccacaatgatgccgcaaggcttgttgggatacacgcgattggctcttgcgatagcctgcataagcgtgtgggatttcatcggcttgtccagataaagggtagaaaggtttttgacatcaaagcctgtgagccacatcgcacacacgaaaacgagctgcaatttgtcattcggctctttgaatctatcctcgatatcctttccgtcaacggtgattgcattcatttttgcccgatgagtcgtgatgtctaggcccttggaggcaaacttcttcacttcatccgcctcttcggaaataatgactgccatctccacatgattcatataatcaaggatagcggtcagcctggcacgatcatccttggttttggcggcattacgctcagcaatgatggttttcttttcctctgcccaataatgctgcaccttgttatacatggtgacagcggtgtatttatcaacagacaccaccataccttttccaaggaaaccacgccgtgggaaatgatgggcaatatccctggcaatcttctccaatcgatcatcacgcttgataacctccaaaatgcgggatgcagaattttcaaggagccgcgcctcatcatcattgaggttttcctcctcgataatatctaccacatcatcgtcaaggaaatcattggtcagacctacttccggcacacggcggctgtagaacaacggcaccgtagagccgtcctctacggattgggcgaagttatactcggaaacataatcgccaaaccactggttggtcagtctcttggagcctaacagcggtgtgcctgtgaatgcgatgaagtttgcattcggcagggcggctcgcatattttcagccaaatccttgtactgtgtgcggtgagcctcatccaccatcacaaaaatatcgttgcgtgtggacagcacagggtacttcttggttttgtcataacggaatttatgaataagcgtgaacacaaattccttgttcttctgcaggaaatcacggagctgctcaccatttttcggctggcactcatcgttgttgccgataacctctgtgcgcacaaaattcttgtgaatctgcgtatccaggtcatctcggtcggtaatcaccaggaatgtgaaattgcctgtgattttgcgtttcaccttacgggcaaacatcaccatagaataggatttgccgctgccctgggtatgccagaatacacccaacttacccttgagttcctctttccgttccacagcacagacgaggttattgacacccaggtactggtggtttttagcgataatcttgtacttgcggttatcgaacagcacgaaattttcaatataatcgacaagtcgctcctttttaaggaggccgtcaataaaatacacgatggacacaccgctgtcgcggattccggcgcggtcgggcttttctttttcgctgtccaccttcagccattcaaagaaataatcataggtggcattgaaggcaccgagccgtgtttcaagaccattggacaggacgcagatctggttgaaagcaaacaaattaggaatatccttgatgtagtcctgcaaatttttgttataggcctcttctaccttcaccacgctgtttttcagctcgatgaacaccaggggcagaccattgacgaaaatcagcacatcgggcctgcgccaatatagtttaccccgtatccacatctgcgacactgccgtgaaggtgttattggtgggtgtgtcaaaatccaccagttttacgaaatcgaagtcatccctgccgttgcggcgcaccttgaccttaatttgattgcggattttattatataaatcatagttggtggccaccatgtccgtgcctgtgaaatcacgggtcagcgttttcaccacatcgtcaatgatgctttcggggatgtggggattaatcttgacaagagaggccttcaaaatgcacggcaaaacacactcctttttcgaggagcgtcccgtgccgtcatcgaggttctcacgcttgcttgggtcggcatcgcacttgacaatgtcatacccaaagtcagggtgggaaagtctgtctaaaacggctatctcaatatcatcttcagtaatatattttgccattttatcacctcccgtatttacacttctaacttaccactcatgaggcggggtaggagcatatcccgctgtttggtaaggttagcatttttgtctttcaataatttgatttgctcgtatatcggctcaactttatcgcagtatgcttggatggtgtcatcatcagggataatagtacacagacgattgatattcttcggatacacatggggctgtgctgcacccacctgcatattgctgattaccggctgcaagaacttcagtgcgttataaataaaccacagttttttatcgtcctgacagtatgagcaatctgctgcccaaatatcagacagatggtattttaagtatccggcatttgcgccggaggcactgattgtgagagattttcctgtaacattattagcattgtgataaccggaaggctctaagccagcagaaatcacaggaatatctccctcaaccatttcagcagccgtgatattcttaccacgcacaaaagtgccgatttcggaaaatttcccataatgccaaccttcggggcagaccatttctgtggcctttgatgcaaccacccatccacgagggaattgctctttcaaggaataattctcatgaccaggaaaacggaaatggacaaaccactcttcataaagcttttcagccatcttctccaatagcttgatgcgtttgttgttgatatgaatcaattcatcatatttagatagcacagcggctatctttttctgaatgcctatttccggaaatgtccacttgatgcttttaatatctgttggacttacattaacttgatttgccccaccgtatgctctgttggcaatgtcatactttatagccttcgtagaaaagagataatataaataatccttgtcaactgaggcaaatgggataacttttcctgcgcgttggtttagaagataaagcctgtctgtataattccgacaacttcttccgaccatagaattcggttggttaatgtggctacccgtaagggaaactaaaatatcacctttttcgattcggtattttgggtcgagcttttcgaaaaaaacatcatcgacatattgtgtttgttcatcaagtattacatcacatccgttgcttatgtttccgattttgataacaggaattccctcatcttgccaatcagaacttttgaatgcatacccagaaatgactttgcaatatgtacctaattttgcataatccatattcatacccccaacaactcgttcaaattattggaaatggaattttccagttcacgagcctccgcattgagtgctcctaaggcctcgttgagggacagcatttctgccttgaattcctctgcggtcaaaccatcatcctcaataaccacgcccacatagcgacctgcgttgagggaatagtcctgatccacgatgccgtcctcgccgttcagcttggcaaccttacaaagaccgatgacatcgcggtacacgccctcggggaaacgctcggtaagccaatcgatttgagcctgccagtatgccttggtcttttcttccttgtcctcggaggtttccggagcaacggcaagggcagttttatattctgcaatcaaatctgcgaaagcctgtgtatcaccctcgtacaaatgggaaatgatgcccaggttcttaatctgctcttcgctgaatttacgatgggctcggtcaatctgcatgaacacatttctggcatcgataaagaggatttcgtcttttttatctgtgtgcgcctttgccttgtcaaagaaccacaaggtagccgggagcgtcaccgaagagaacatattggagggcagcgtcaccatttggctgatgatgccttcctcaatcatcttcttgcggatatcgtattcgctgtttccggcatcggaggcggagtttgccataacgagagcagccttgccattgtccttcaatgccgatgcaaaataggaaatccacaaatagttggcattgggtacagtttcttttttgtcacttgcctttttcgctgttttggatttgttcttcggaatgccgtaggtgttgaaacgggcatcatcctttacacgctcatacaccacctcatctacattgaaaggcggatttgccatgacatagtcgaatctgccaacggcatcataagggtcggcatagaaggagttcgcctcggcgatttcaccacgcacattgttcagcagcagattcatttttgccagcttaacggtgtccggctctttttccacgccgtagcaacggaatttcatatccgcgtcgctggcattgtggttgtgcatataccgagctgcctggacaaacatacctccagaaccgcaggcggggtcgaggaacattttatcaccggaagtcggctgcaacacctccaccatatatcgaacaaccgtggcgggggtatagaaggtgccgccgtccttaccttcctgcaaggcgaaattgcccaagaagtattcgtaaatttctccgaaaaggtcaatgctgatattttcggggatgtccttgaagacgcggacgattttggagagcagatccggctcttcctccggcacaagctgtccatacacttccttgggcagaactccgtccattttatcgttgttttcctcgatggcggtcatcgcctttttcacaagggtggctttgttggcatcatcgggagcgtcgttgatagcatcgtaatatgcctccggcggcagatagaaaccacaaacctcgatggaaatctctttcatggatttttccattcgagtgcctttccgcttattatatttttcctcaatttcctccttgtactgcttgtaaaggatgtcagcataacgcaggaaaatcaaaccaaggataggctgtccgtatttattggcagccaggtgtgcgcccgcacgaagtatatccgcggaatgccagagatcatccttcagcttcttcaattctttatcggtcatgttgtgttgcctcctccggcataaattctaatatatcgtttggtgtgcagttcatggcatagcaaatgcgttccgcttgttcaagcgccatgtactgttcattttttgtcttggcaataatgtttgcagagatggttgccggcgcatctgttcagcatgggatgcatcctgttcaatcatcaaacgctgcaatctttgatggttggccgccaaaaaaatactatttccgccaggaggggtcgggcaccgctccgcgggcctggagcgtcatgatgagcatcttgagctcgctgaggcgcaggtcgtgttccttcctgacctggggattcagagagccgtgaaacagccattgatccgtctgggcggacatcaggcgctgggccgtcagcgccatggacagggcctgccccggagactgggccgcaatggccgcgctccaggaatacagcatattactgtaaatggtggtccaggcgaacatgcggtcgtcaaacctgccgggactctccacataggggcgcagcagcctctccgcctccgcaaggcgcccctggcggatgtaaagcaggcttttggccgctgccaggccgtgattgccgggactccgcaattccgcctcttcctcctgccgttccagttccttgagccgcgcctcgtctggagcggcaggactgcccacggcatgcaggatgctgcgccgcaccaggtccgggtccaggctgctggaagcggcctcttccagcatgggaagccgttcgttggaggaaaccggaacggcccggagggaggccttccagaccgggaaagcccggaacgcgtagcacagggccagcgccgccagcagcagcgcggcagaggcctggaaccagcgtccggcgcgccgggaggccttcacccgggaaagggaggcggtgcaagtgatgccgcagcacagggcgctggcgcccagcaatgccggattgtgccagatgaactccccataggcatggaaggcggcgatgcacagcacgcagaaggcagccggccccaggggattggcgcgctggtgttcccccgccagcttgagcacgctccggaacccggaaaagaggaacaggaccagcagggccagcatcagccccagcccggcataaccgtagtcgcaggcggcctgcgcgtactcatggtgggcgaaattggggaggctggccccggcaaaaaactccgtggaaaggttggtgaacatccggctgccgtggccgaaccatggggcctggtccgccagcgcccacgccagtttggacaggtccagacggctcccgaaggagaacgtatccagcagggaggccagctttccggctccgttggccaggtccagcacggcataagccgctcccaggaagagaagcaggatgaacaagatggccgccgtataaaatttcctgttattgcggaaaacgctggaggtataaatgaaaaagcacagggtgacgccagccagcgcattcggaaaggcggcgcgggaactgcaggtgaaggaaacgagaacgagcgccagccccgtgaacaggctgatgccccatttcctggcggaagccatgctgtacgcgcagaggaaaaatcccgtgacggacaggaaatgagcggaaaaattcttgtacccgaagagcccgatgttgcgcagctccgttccgaacagggaataatccggcctgaaccaggaggcctccgtacccgtcatgttctggtacccccacagcagggcgttcagcaatcccagcgccgccgccagcacgggaagaacgctcctttccccattcccggctccggcatacgcccccgccatgaacatggccatggccgtgacgatgaggcccaggtccgccactccctcatagtaaaaccagggtgaaaaccacgcccgcaggaggaaatagccgcctcccagccccagcgccagccatcccggcagcccggggctgggaatcttgtacccccggaggatgcagaagcagaacagcagaagggccgccgccagaaggcaggcgggaagaaaaagggtgtgccactccccacctgccgccgccgtcgccagaagggcgtaaaaaagggccagcagggccatcagggcttttccggcggcggtttcagcaatgcgtggtgcggaaggcttgctgggggcggggtctggcatggctgggaacgggctggatgacgacagggaaggtaacattataaacgcgggacccccccttgccaagagcaagcttccgtacaggacgggatggatgcggcggcccgcgcgttaaaaccggatgggccggaaaagggggaggaaagggagataaaaggaatggagtgaaaaacggctttcatggaaggatggcatttacctcctgttttgaaagaaggctttcaggaagcgccgcatgcttctgaatgaatgcacggacaaaggccgcactttcaaaaaccgtattccttcattctcttgaacattccttcgctggctcccggtttcctttcggccgcggcaaaggcctgctgctcttctgcgcggccttccatttcaaatgtggagctgaaagaccaggtatccggccttccgctttcccggcccgttacgcctggatgccgaatttgcgtttgatctccggaatggaataattcaccagcgtgggcttgccgcccggggtgcagtacggcacttcgcaggccagcagttctttcaggatggccggggcgcggtgcggggaaatacgttccttccaggcggatttcctggcgatttccccgatgaaggtctcataagccatgcgtttggcgttccggctgaattcggactgggtgaggcggtccaccagctccagcaggaaggcgcgggcgttctccagttccagcagggcgggcagggattctatcctgatcgtgttctggccgaagggcgtgacggtcattccggcctggtcaaagtggggtgcgaactgctggataacggcaaaatcccgcgggtccaggtccagtatcaccgggtccagaagctgctgggacggcatgggcgcttcccggtgcgcccgcagccgttcaaagatgatgcgttcccgcgcggccctgggatgcatcagcaccaggccctccggcgtttcaaacagggcgaattgctggtggagggttcccatataggtgaacccggcggtggcgtccctctccggagcggcctttccgcaggcgtcccttgcgccgccgccctccgcctgatgctggaaatccagtttcccctgggtggcgggaacctgcttcaggggaatggggcgcagggggggaagaggaacagcctcccgtgattgcctgctgggggcgggggaagaaagggaagggagtttggaggaaggagcgggggccgtgcggggttttgccggagggaaggcctgggaattgtccgcccgggagggtgtttccccatgcggcgcggcggaaggcggttccggagggccgccgtccgtctccggcacggcggcggaagcgtgaatttcctgccgggcgtgtttttggagggtgttggcaatcgcctccacaatggtattaaccacgtccgcggaacggcggaacctcacctccttcttggctgggtgcacgttgacgtccaccagcgcgggctccacctccatgtacaggaagagcgccggatgcagcccggtgggaaaaccgccgtagccgtcccggatggcccggttgatgagctggtcctccacggggcgggtgttcatgaagacgtactgcccctttctggtgcgcctggcctcggaaagcgggagcaggaagcccgtgacggaaatgccgggcccgatggtcgtttctatcggaatcagggctgccgccgtagccgcatccgtcagcgcggagatgcggacgcgcaggtccgccgtggccggaaggtcgaagacgagctggtcgtcccgcttgtaggtaaagcgcacctggggataggccagggcatgcaggcgtatctggtgctccacatgggaagcttccgtctccgcggatttcaggaacttgcggcgtgccggggtattgtaaaacaggtcggagacctcaatggcggtgccgggggagacgccggaacttctcggctcgtgctccagcccgccgtcgatgcgtacttcccagccctccagcgcctgctgctgcctggtgcagagcttgaagcgggagacgctggcaatgctgggaatggcctctccgcggaagcctaggtgagtgatttcaaacaggtcctccagggaggaaagcttgctggtggcgtgccgcttggcgcacaggcacgcgtcttcccgggacatgccgcagccgtcgtccgtcaccttgatcaggcccacgcctccgcggcgtatctccacccgcacggatctggctccggcgtccaggctgttttccaccagctccttcacgacggaggcggggcgttccaccacctcgcccgccgccacctggctggcaagagtgggggacatgacgtggatggagggcatggcggtgacggattgggaagggaaataaaggaaaaagggagcctagccgccggcgacgatggagacgatttccacccggtctccgggagaaaccgtaatccgggaaaaatcctgcggcagaagcgcggagccgttgtgctccacgacgacgggtttgccgttcatgttcaagagttccagaagccgggaaacggaacagggttccgccagtccatacggggctccgttcagcgtaatttcgttctgggctgccatggcggaagtaaccataccacaacgggtggaaaaatccagaaacataccggggggatggcgtaaaaaagattccggttcaagacggaaggaaaagaaaaaactggcatcgcgtacgggactcgaacccgtgttgcccgcgtgaaaggcgggagtcctagaccgctagacgaacgcgacattaggtttgcagggactgcgcgacggagtaaacacaaccaccgcgcaaaaggcaagaactatttaaccaaggccgcaaaaaagcgtacttacgggagttccctccctcattcttgaaagtgtgaaaacaacctgattcaccaataccaagccaatacaaaaaacttgcatgccaaataatgccaatatataacggcggtatctgctacaaaaactatgcgctatctgctatccatccttactatcctagccatcattggaacagtctggtacaataaccatttgacagtacaacacgaccagaacgtaaatgaactgaactctcaactggaaaagctgcaactcactacagagcccaaaatcaataatctggagagaaagataaaggaatcttatgacactcttgacctggaagaagaaacattccggaacaagagggatgcgttagaaactatcctcaaacaaacacaagcacaacaggaacgaacagcacaacagaacgcggaacgggctttacgccgtaaaaaggccgctgtggaaacagcactagctaaccgtgaattaactgctaaggaatgggaagtcacgctggcgacttttaaaacacgacgggcagaatagctaaattacttgataaaaataaacaacagataactcttaataataggaaacttgctgacatcattaaacgtgatacggaagacatagcaagacgggcagacgctatgaggtccgccgcccgcgcatcaatggcaagcggaagggctggaggccgaggaacctcttatgcgatcattgaagccaaggaagccatggaaaaaaagcacaggaacatgaacaaagcggttgccctgcaaaacagaaaactcatggaatccatagatactatggaaaaagaattggtccaaatggatcgggcggaagaaaaatttatgcaattgaactctccgcataataaaccagttgcacaccttgaacactctgaagaattcgtggcaaaagtgcccgtaggagaaaaagcacaccaggaccttctaaaactccacgaagaacacaaactctccattaaaaagcttcagaacacaattaacgacctactggacgcaaaaaaatctttagaaaccaggcttagcgacgttcgccgtgacatcaacaagcaaaaaatggatattcaagataagcatcagcaaagactgagaaacgctcaattcacaggatacgcaatcattggaattttagcaattcttacgctcatttctttttcttttacaaatagatacgcctgataagtcacattgccttcccctctctagtcgtgccctcacagggtacggcttttttgttgtctaaactctaactgtcacttttgccaaggagtgcagcacttcctgtgtccgggcagcagcttgagaagccaaggggcggcggcctggcgcaatggcggaagctaccgaatgaccattagccggccgtcaatgcattcttgggggattgcggtagaatggaccctgaccataacggcctaaaagttcatcggccgcaggcacgcctttccggaacggattatgatgccttttgggagttcgtggaagatgaaggcggcgtgtccctggggcgggagcgggattatgactggatgcactttcagtttgcgcggttgtaaataaattgtaataaaggggatattcctgtatatccgcattgccgggttggtcccggactaaagaaaggaggtgtaacatgtgatacttaaccccgaattagtagtacggctgatggaacttattattgttctgactagctaaaagaaagccccggcctggtgacgcaggctggggcgattttttagaggtgtatgcgatacacgaactagtagtaatgccaatatgtgctagaaccactttttgtcaagataaatattatcagcttttatcagcttttatcaagtaatttggaaagtgtatttcttacttcgcttttttccgcgggagtcccatttgacggtgcggccgtcatttaactggaacgtcttgccgccataagtggaattgagcaggaaggaaaagcgtttattggaagcttgggtgaacttatagcggggtatcttgctttcgtgtccatcttcgtccttttccgttacagatcaaggttgagttccgggtgtttgcgggtgcgcggtttgggggcgtcctgcttcttttttttgcgggatttcttttgagccttccggctggtccaagatacttgtgcaagcttgcgcagggcagtcttcccgtatttcccgataagagcttgcgcttgatcgggtgttaaggagtcaaggaaatcgttgcaggcgtgcgcccgcatggatgatgcggaaatggtatcactggtcaggagagcaaggtcagaatgcgacaagttttctacggattttggacagtagagtttggcaagcttgtaaacgttccgggtaacgcgttgcgggtgatggccgttgcgaaaaaggatagtgaaaataccgataaggatatgcaaacgggcatccgctatttcttcttttaccacgtcaagttgatggtggtttagaccgcattcatagagtgcttttgagagttccgggaggatgggcgtggcgtcaaaaggcgcgctccattgctcctgtgtttctccgtgcgcatgcaacaggtagtcaagcgcgcctccttgagcgtggataacagaggggctggaactcataccgtacccccccttcccgggacaagacttgctctgaatgtggagctaaaaacaagaggtttactacgtttcttgctacgctaaaggcgtaaacgtttgaaagtaaacatggaggcgggagcgggaatcgaacccgcgaataacgattttgcagaccgtcgccttaccacttggctaccccgccgctgatgttgtgcgcggatactaggggaaagaaccgcgggtgtcaatctcgtttttggaaaagatgcgctgtttctgcggaaggctgtccgggaatccggccaccttccggatggggcggcattgctttcaaggcgtcttcccgggagacggcggcgttgatgggcaagttcctggtttcctgcttttccgcatagtgaatgacaaggcggacgcgatcatatttttccgggaaagtgcaggtgaacgggtggaattcgatcggccccgaacggcatcgcgccatttctgttttcacggggatcctgtgtccctcccggtcaaggaataccatgccggcataggggaagctcacaggataaatgagcccgatgctccatgtgttggtttccgtatacggattcacccttatgtccagatgcgggcatttttccagattggctacgtccgtcccttcctcaagaaaggaggagatgcagagagggatggaatacgcggcgttcggacggagatcgatttccgtttctggcagagtggccagccgcgcgcatttcaccggcacctttcccttgatctggattcttccgtcttgggggaaggggcggtccttaaccagaaggcccagggagaatatgcctttgcctgtttcctgttcataggaatgatgggaaatgctgatggacgtgtctttcaaagaaattccatttccgcttctgatgctcagtcctgttggactggcagctgcagagagtacggcgcggggggaagtgtaactgccggtgaataggaaataacggtatttcggaaagaagctggttagttgaagcttgatggcctttctgcagaatgtttcatgccgctccccccttgaaagggagggaatgagcaggaggaaaagggccggaagaagcttcatggatggctgatgaacgaaaagggggagggatacggaggcgcctcccgtgcaaagccggagccggaaagatggtttatggcggtttttaacggttggacagcagctgcttcatttccggaagacggaagtgcagcggaggaagctcctcctcaaacgcggctgatttttctttcctcagggcttccgcccgttcttccagtttccgggcttcagccaggattttgcgtatttcctgccgcccgcggcctatgtgggaaacggcccgggacgggtccggcgtgaattccggacctcccttgaggtatttttcaaagtattgctggtagcgttccgccagttcccgccctctggcaaagagcttgcggtcttcttccacataggccgccacggcggggtccacgtctttcgtgctcaggtccgccagttcttcgtcccgctcccgcagcaggtccgccgcgtccctgctgctttccgccaggccgggaagggtgggattctttttcagcttcaggaggcgctgcaccagcgcatcgcttttttccgagtattccgtattgatgtccgccgcctttttccagtaggagacggtggggtcaccgcaggaggccatcaggaaggcggccagaaaggggagcgtgcggcgcaggaaagtaagggaagtcatgttccttttgtagcattcccgtgacgggaatcaaggctgttttacgggtccccggcttctgcttcttatgaaaagatgctgaatcttaatcggttccgtttctggaacgtttcttttccgccggaggcggcatttccaccacgccgctgctgtttccgggcgtcagcaggatttccacctccaggggcagggacgtatccgccagcaggccttccgggatggagatgccgatgggggcggagcttttgccgggcagcacttcctggggggagatgatgtccagaatgaggcgtccgtgctggagaatgttgattttgctgatggagaaggcgtccttcatgcccgtgttatgcagcgtgacgcccttgagctgggatggggcgaacggtcccggaacggtgaagcgcaggatggtggattccctcctggcaagcggcaggggaagccagtacgccgcaatgggcgcctccgggttcaggctgtccgtcaggtaggcggatccgttgagacgttccatcatcaggccggaaagctccggggaagcgggcacgccccagccctgggagtacatgagggagagcaggtacagggcttcctggtcccggtactggaccgccattctcaggaaccgcgccgcctgggcgtaatcccgggaggccagagggggctgctgtggcaggcggggaaaataggaggggatgtccatgagcaggatgcccagctccttcatggcctcatagcatcctccggtggcggaacggtagagccattccaccccttcttccggcctggggccgccggggcagtcaggagacatgaggagtttccccaatacctgctgggccaccgggtagccggctttggacagttgttccagagccgccagcatgtccggcgtggcgttcgccaggccgagaacgttcccgtgccccggggaaggcgtggtgactgccgccacgagccccttgtaggcagggtcatgcatcagggccggttccggcgccgcgggggcgatgatgaagcggattttagggaaggcctcctccgtgcgttccgtttcgcttttgaagcacgccatttgcatggggacggccttgtgggcggcggtttcaaaggcgtatgtgtaggcgcggtccgtggagagctccggcagggccgggaagaagaaggtggaggtggattgccccggcaccgtgaaggaggggacggagttgacggaacggtccaccagggctccgttggagtcccggatggtgaggtgcagttcctcccctccggtggccggagggataatctggaggtagatgcaggagatgcgcagcttttccggcaggatggaggggatgccggaacgggtcagaatcgtatcgtccaggcgcagctggaattccttcagcgtccgcggttccagcgccgcgtcttccgtcattctgagctccgggatgcggatggatgccaggtcccggggcggaggggccaattccttcccgttggcggccggctgctggatggcctccttgatggtattgatggtggtgcccatgggggcctttttcaggtagtccatcaggtagaacgccgctgcgcccagcagcagggtgcagacgctccccaccatcaggaacatcatgtggcggttgcggcggagggtgcgcgcggacagcctgcgggaggaggaatgaagtccgcccgtcccggcggtggcctttttgttcccggaattcttctccgcgcagggatgcggcattccttccggatgaatgtggcggatgtccgccggggatacctggatggtggcggaggattcttccccggaaatggcgcaaatgtcgtgaatccattcacgggccgtctggtagcggcagctggtctggggagccagcgccttgtccagcgaaagcaggaactgccgcgagtaatagcgggtgagcacggggtcgctgtgcagcggcggcatgccgtcttccgtcaggcgcacttccgcccgttccggcgggtggcccgtgaggagggcgtaaaaggtggcgcctacggaataaaggtcgctccaggggccgatgttcgttttccccagcgcctgttccggggaggaatacccctgggtggtcaggacggtggcggcatgcagcttcagggcatggcgcgccgcgccgaagtcgatcagcacgggcgtgccttcctccgtcagcaggatgttgccgggcttgatgtcacggtggtagatgtgcctggaatggaggtagtccagaatccgcagcaggcgggtcagcaggcccttgagttcgtcctccgtgtagcggtgcccggtgctgtggagtttctcccccaggtagtccagggaaagcccggtgatgttctccatggcgaagtaggcggtgccgttggcttcaaaaacggacaggattctgacgatgccgggatggttgagctccgccagcgtctgggcctcgctcaggaaactcttcagggcccaggtgtagttttccaggtcgtgctcgttgttgggccggatatgcccggtcagcgggtcccggtaggagcagctggagggaaagttttccttgatgaccacgttgcggttcaggaacaggtccttcgccaggtaggtgatgccgaagcccccgctgcccaggacgcggatgatttcatactgttccaggcgcgtgccgggggccagctccctctggtaaacgaaaaaggcgcctttttcttccgcgtgggggagaggggggcgtccgggcagaatctgttccaggcctgtcgttggagcgggaggcgggacttgccctgtcgtccggggctggtcgtctggctggccttcttctgctggcatgagggaaagttcctgaaacggaagctgcgggcattctcatatgccgggtgcggcaagtcaaggtgaatgcctgttttcctccgtatcaggactgccgcctgtgcgtagtatctaaaacggcgcaagaggaatgaaaggaataaacctaaagggagagatgaaggcgggggattctttctgccttgtccttcctgtccgccatggctatgaattctattcccgtgaaagccgttccttcgcgttttcaggatttgtggcgtctgatgaattcccgtgcggctttcaggtaggcttccgccgccgttccggaaggatcgtgttcaaagatggtgtggccgaagctgggcgcttccccgagccggatggagcggggaatgaccgtcttgtacagcatctggggcaggtgctgttccacctggtcaatgacctggcgggaaaggttggtgcggccgtcgtacatggtcatcagcaccccttcatgcctgatgcggggattggctccgctggcgcagatctgcgccgtcacgtgcaggattttggccaatccttccagcccgaaccattcgcattgcaggggagtcagcacttcgtcgcaggcggccagggcggaggtcatcaggactcccagggaaggaggcgtatccatgatgcagtaatcataggcatccgactcccgcaggggagcgagcgtttcccggagccgggtcaggtggttgccggagcgggccagttctatttccacgccggccaggtccatggtggagggaatgatgtccagccgttttctgccggaaggcaggatgcactcttccgccgcaagctggccgagcagggccgggtacaggctgggcatgtcttttccgtcaatgcccatgccgctggtggcattggcctgcggatccaggtcaatgacaaggattttcttcttcagctgggccagggcggcggccaggttgatggccgtggtggtttttcccactccccccttctggttggcgatggcgatgattttcattcgggaaaagggtgcggggaaaaggtagcataacgggaggccctttcaaccattttcccggagaggcggggcggcctgcgggctgcagcggacctttccctttagggaacggcttgttgcgtggaacggaggagcaggggaaatctgctgctgcgggggcggtgtgccccggcgtcagggtgccgtgggaacggcggggcggtcggaagacaggatgaggcggaagcccagcgcgtcatcccgcgtgttttccggcaggggggtgcggatggaggtggtgagctgcttggggcggaaggagaggtagctgcctccgcgggccactccgtaattgcggatggggagggactccggccctccgtaggaatcgtccacccattccatgacgttcccctccaggtcgtacaggcctagatggttgggcgggaaggtcttcacgggggccgtgtacggctgcccgtcctcataccccacgatgacgcgggaggaaggaaggtaaatcagggcggactggtccgcaaaattgcctgttctgtccggcggcggccaggagaacccccacgggaacacctcccgggagttttcatggggcagcgtcttttcatagggggaggatcccttttcatccgtcaggcgcacccaggagctccattcctcgtctttgggcaggcggtaggagtcgtgctggtcgatcaggccctgggcccgctccttgttggtgagccatttggcaaaggcgcgcgcgtcctgcctgctgacgtttaccaccgggtggttttccccctgggggaagccgggccgggccggagccttcctgcccgtggctttcaggaactgctggaagtccttcacgcgcacctcatgggacatgaccagcgcgtttcctcccacgggcgccaggtccatgcccaggctgttggtccagggcgagccgaagacgacggacttgtccggctccagctggagggaaaggtataaatcctgcgggtccagcccccggcgccgcatggtggcgtgccccggcagtttgatttcaatcacgtagggcacctggttgacgtattcctcaatgggcgtgcggccgatcagcctgttgttgaaaaagacgctggcgcccggcggattggtggtgacggtgatggggacctggaacacgcgcgtgacgttcaggacgtaggcgctgtggccgtccgcgctgccggacgtctgcggcagcgggtccgcattgatggaaaactccttgcccagcagtccctcccgttcgcatttcttgttcagccacgccaggtaggccgtgatgccgtcctgcgtgagcagggccacgtccttttccggatggcccggttccgcctgctccctcttcatctggtagtttcccttctggtggtcctccttcaggaacttgttgaacagggcggcggtgagagggccttgcgccacatggcgcgtttccgcgggaatgtaggtgactccctccgtatccttccacggctggctgtccgtggggggatggtattccttcagcacgccgcccagggccagcgtggagccgcccttgacggttcccgcctcctccttgtccgcgaagcccgatttcttgatggtataggccacggaggaaccggagggcagttcaatggggccgtagggcgtttcatccaggtaattgccgtccgcatcataaacggacgctcccgccggggagctggtcaccagcacgtacccggtccgggactcctcctccggtgcggaggagtgggtttccgggcgcacgtccgcggcaggttcctccgcgggatgctggctattgttgagccacagggccccccagtaggcggtcagggctcccgcgacggcggcggccagcagctggagggtgcgcctgagcttgcggcgcttctttttcttctggaggcggaagcgggtaggcacttcatacccccgcagaacgtctattttctccgccagctcttccgcggaatcaatggcgcactcctccacgcggggttccgccgcctggcagatgatggtgttgaacgcctgccacttcttgcgcacggtgccttccggcagatcatccggaagcgcgggaaaatccatgcggtcctttcccgtgctgatttcatataaaaccttggccagcgcgtaaacgtccgcccgccgggtgccggggccgtccggggggatgaacccctccgtgcctacaaagctgcgctggtccagatgggccaccaggccgatgtccgccagcttgggccgtccgttgacgaagatgacgttggccggcttgatgtcccggtgcgtcaggttcttgctgtgcaggtacagcagggcgtgggccagctggctgcctacctccaggcagtaatccaggggcagcggcttgttgccggaaaacttcttgtccgtctggagcgtgcggggaatatactcgtccggcgtgatgtggaccccggtgcgggcgtcgtcgcccagctccatgacgtaatagtaaaacggggaatcctggtcgtgcctccccacgtgcaggatgtggaccagccccggatggttgcgggcgatgggttcatactgcaggatgccttcaaactcacggttgaacgtgcgctcatcctcaaaatcctcacgccagacgattttcacggcgcgccacgccccggtcagggacctggccagccagacctccccgtatgcgccgctgcctatctggcgcacgacttcgtggtccggaatggaaggagtgggacgcaccacccgtttgacgggcagcgtcggcagattgccgccgggcatgggtgatgcgtccgaagtcatggagggtgcaggaatcaggaaataactcccaggttcttgcccaccttgcagaaggcttcaatcgccttgtccagctgttcgcgggtgtgggcggcggaaatctgcgtgcggatgcgggcctgccccttgggaacgacggggtagaagaagccgacggcgtacacgccttcgtccagaagctgggcggagaaattctgggacagcacggcgtcccccagcatcaccggggaaatggggtggtccttgccgccgatggtgaaacccgcggccgtcatggcgtcgcggaaatacttggtattcgcttccacgcggtcgcgcgcttccgtggactgttccagcaggtccagcaccttgatggaggcggccacgatggcgggggccacgctgttggagaacaggtaagggcgcgccttctggcgcaggacgtccaccacttccttcgggccggaaacatagccgccggaggcgccccccagggccttgcccagggtgccggtagtgatgtctatgttgccgaacaggccgcggtattcgtgcgtgccgcggccccgcttgcccaggaaacccgtggcgtggcagtcgtcaaaatggacgatggcgttgtacctggcggccagctcgtgaatcttgtccagctgggcgatgatgccgtccatggaaaacacgccgtccgtggaaatcagcttcacgcgggctccggcggcatccgcttcctggagcttggcttccaggtccgccatgtcgttgttggcgtagcggaagcgcttggccttgcagaggcgcacgccgtcaatgatggaggcgtggttcagggaatcggaaataatggcgtcgtccgcggtcaggaggccttcaaacaggccgccgttggcgtcaaagcaggaggggaacagaatcgtgtcttccgtgccgaggaactgggaaaggcgttcctcaagctggcggtgcagggtctgcgtgccgcagatgaaccgcacggaagccatgccgaagccccattcgtcaatggctttcttggcggcctccatcacttccggattattggccaggcccaggtaattgttggcgcacatgttgatgacggagcgtccgtcctttagcgtcacctgggaatattgctgggaggcgatgaagcgttcttccttgtacagaccttccgcacgcagtccgtccagggtggaagtgaggatgtttttgaattcgggggtatacatgtcgaataatggaatatgaattgaaatagccagcaagtgaacgatcaaggatcacacggttgctcccgcacctttatcattattgagccgtgaagaaaagcttaaagaacacaaattgaaggccgggagaggacggaacggagaagcggaacccctccgcttatcccgcggtgacgggaaaaacgggagccggtcagaggggtgcgtttcctgaagaaaaagaacagggaaaaacaggaaaaatactaaccggtccggaatgcatgaacggcaggcggggacgggcagggaggagttctccggagtatgggaaatgcatttgatacacaaaacaggtgtcagagcgcgcttgaaaaagtgaaggccggttccaacctccggccattaaacccatcatacccgatcatgaaactatcccgtatttccttatggagcctgaccctggcaggatgcctgcctgccgtgcgcgccgaatcctggaaccagttcccggaaagcggtccggaaaccacgctggattccatgtgggcgtccgcggcttatgtgcagacgctggtggaagcctcctccgcccagataaatatctcccgttttcagcagaagggaccgtccaacctgtgggcgggcgctctgggcagctttggcgatgccggaatccggaacaaccagccttcctttgactactcagccgccggctacgcgctggggtatgactacggcacgtatggagaaaaatccggttccctgctgggtctggcgttcgggcagatgttcgggcaccagaacattcaggaaatgccggactatccggacggtcccctagagggagaccgcttccggcagtctgcgtggatggccaacctgtacggcgccttcttccgggaaacgggcccgcggtccagcctgcttcttgccgcgaatgcggccttcggcagtacggaaaacaaatgccgccacagtgatgcgtggggaaacgcctccaagtggaactcggaaacgttccaggcggggctttccgcctcctggcgctatcaggtgacgaactccttcagcgtgatcccctttatgggagtaacgtatgtgcacggagccaacaaggtgaaaagggatgaccggggcggttacggcgattcctcctggtggggggattactggtgggacgacgacgactgggacgatgacgatgatgataaccagcggcgggacaaccggggcacgtttgacaatgtgtccctggcgatgggggtgacgctggaacacgttctccgcctgtccggaaacaccgtatggatcaatgccctgtccgggagctactgcccggacatctaccggaacgatccccattacacgttccgggacggctggtgggaaggggatgaataccgggaatcccggtacaaggggaagggctactctcccggaaagcagtcattcaaagtcaagctgctgtccagaatggtcttcaatgacagatgctccgtcttcgcctcctaccaggcgcatttcagggaatccttcctggagcatcaggcggcgctgggcgtctccgtctccttctgaacattgatgctgccgggggagagccggaaggaaaaaaagtccggtttctcccggatggctcagagggaaggggaggcggagggcgcctgtttttccttgccggggcaatccccggttttcagggaaaactccagcatccggtccccctcaaacgtgaaaaacgcctcaaaccgtttcccgtccagcatggcgggaagccagaaccggtcatcctgccacatgagatcgtagggaatcccgtccaccgggcaccagaaaggctctgcctccggcgtttccaaaggggtgcccttgaaagaggacgccatgaacacgtggcagcggatttccggaatggtgccgcacgtgaaggaaaaattcagcacgcccatttcccgggcgtccgcaacgtcaatgcagagttcctcccggacctcccgcagcacacactggagggccgtttcccccggctcaaacttcccgccgggtccgttcaccttccccgcgccgatccccctcttcttgcgtatcaggagaatctttccgtcctgcaccacaaacatcagggtggcgaggatatcaggggtccactgggcaggccattgaaagccgctgcttctgtcttgcatgggcgcatgttacaggatgagagggaaatcatgaagaaaaatgcgaaataaacctggttgccgccagttccgggacatggtttcgcgccggtgaggtatgagggttgagatgaagacttgccgattatggaaaaggaaaatccctctcaacttctcatggaagttgagaaggattaccgtcaataatttgcctcctgctgcggaggactcatcccaggaatgagtggtagtttttccttaataaaaagcatccaggtgaaagatattgttaaacctgccttggtagcgatgatcaatggttagaaatgcttctttaagttctcctggcagatcggtctcgctgtcgcattccagaacgaagaagttggggtcaaaaatgtgcaccttccccttttcgtggtgaatgccgatggcgtgtccattaggttcggctcctcgaatggctaaaatagtgtaggtgacgtcctgttgtaaaatcttggaaatagcgtaatccataaaattattttggaagaagtttactgggaccatttcgttatgcagcatccgcattcccccttcaatagccattttttcacggctacggacaatgacatccgccatgtcgttttgttcatggaaaacggaggcttttgccgcgtatccctctccatagataagggatgcctttgaaatggactgattacgaggcgtactgatgctgtgttcaatatcggcccagaattgactttcttcatgacgatggcatgcaatgagccaataagtgaccaggcccagacatattccggaaggataaatattccctgtctggcgaatcaactgtccctgactgaatgattttatttctttcatgattcttcttaatgaaatggttgagagcgcatcattccatgaagaagaggcggaggacatgatggttttccctgagggaaaatcaacttcccggagcatgggacgggctgttccgccggacccggcttctcccccggaaaagaaatcagtccgttccttccagcaggtcttctttcctgacgcgggaacccgcaagggcgtaggcaagcatgaccagttcacagaggaagacaagcatccatgaccagcgccagcttcccagcgcgtccgtcagcgctccctggaggaaggggaaaacggcgccgccgaacacgcccatcatgaaaatgccggaagccttggcggtgtattttttcagccccacggtggcgagcgtgaaaatacagccccacatgacggaatggaacaaccctacggaaaccagcacccacaggttatgggtgtaaatggcgaccagcgtcaggatggccgccgcggaggttgccgccgtcaactggacacggggggagatatggttcagccagctggaaacgatgcgccccaccatcagtccgccccagtacagggaggccagcagggccggaatgcccaggtccactccccacaccaccaggttgctggagcccaggaacagcagcggttcatccgaattgctgagttccagggcgtgcaggttcacgttgatgcccacggacacctctgcgcccacataaaagaaaatggcgatcacgcccaatgtcaaatgccggaaggaccagatgctgcgttccagtttttctccttctccggccgtggtgtcccggatgttgggcaggtaaaggcgcttcgtcatcagggtgaccagcgcaatgaggacgcccaggataagcagcggaagcatcagctgccgcacgtggacgctctccatgggcagtccggcgaacaggatgccggtcacgaaaaacggcgcgatcgtcgttccgaaggagtttacggcgcagacgatgttgaggcgctggacgggctgggttcccttcaattcataggacgtcacgtaggggttgatgacgacctgcaagaccgtggcggaggtgcccatggcataggaccccgccagaaaaataaaatagccgtaggggatgctggccccggcgatcgtcgtgcgcaggtccccgaactggacggtgaaccatgcggacaggaaaaagacggccagcccgagcaccatgaacaggagcccccgtatcagcgtggtcttgtagccgtagcggttgatccagcgggaggcaatgtttccgttcaccaggtacgccaggaaaaagaaaaagggaattagcgtgatgaacgtgtttttcaaggcgccggcatccgacaggaaggcgctttgcaaaggcccctggaactggccgttcacggtggacaggaacccgacaaggaaataaatgaaggtcagggcaaggaagggacccaggcgtgaatgcggttgtgtttccatgaggagggtgagaggtgaaaatgcagaaaaaggaagagaccggaaaggtttcttcatgccgcccggaacagggtccggaaggcatgaagaattgtatgactacggaagaatcaatttttccagaacggggagcacgccgtctttttcaagcttctccaccatgccgaggtactggctgacgaacttgtccgccgccttcaaatccgtgctccggaagggggagagggcgaggaaatccagcgggtcgtcgctggcgatcagcttccggtcctccttggtcagccagggctcgttcacttcataagcctggccccggtcatcctttccgtgcttcaggtaatggcggtaggcggccacgaaaaacgccaggcgttccaggtcggcgccgtccctgatcatcttcgttaaaacgggcatcacatacacgggaatcttggaaacgccgtcaaagcacaagcggctgatctggtcgctcaccgccttgttgccgaagcgttccagcagggtcttcttgtacagctccaaatccgtattccccggaggcggaacgtaggggcccgcgtcccggtccatgaaaaggcgcaggtagcgggcgaaccgttcatcccctaccgcctcgtccacccggcggtacccggccagaaaggcggggtaggacagcagggagtgggacgcgttcagcaggctgagcttcatattctcataagcggaaacatcgtccgtaaactccacgcccacggtttcccagtccgggcgcccggcaatgaaatcatcctcaatcacccactggatgaaatcctccgaatagacgggggcggcgtcttccacgccgctctgcgcgtccagtcgcttgacgtcgtccggcgtgacggcgggcgtgatgcggtccaccatgctgttggggaatgtcacgttcttcttcacccactgcgccagcccgggatcctgggcctcgataaaggaagtgaacgctttccgggccgtgtctccattgtgctggaggttgtcgcaggatagaacggttacggggcctgcgccgtccttgcgcctcttccgcaatccggcggccaggaacccgaaaaccgtccggggatggtcgggatgttccaggtcatgtttcacgtccttgctgttgagcatgaactcatcggtttccttatccagattgtatcccccttccgtaatggtcagcgtgatgattttagtgcgggggtccgcaatcctgtcgatgaccttttcgggatccttcggcccccacgccagatccaccagggagcctatctcataaaactcgtccttgccgtcgcggccgcagaccgtcagcgtgtaaaggccgtcctggctcttcagcaccttgtaaaggggttcgtcctgaggcagcagcgccactccggaaatcccccattcgtcacggccgcccatgcccagaagctggttcgtgtaaaactcttcatgcgcgcgatggaagttgcccactcctatatggactatccccggctgaatggttgtcctgtcataggggacgggagcccccggaatcttcgccttgccctgtcgtttcagttccttcttcatcatcttgaaatgaggtatggtatttgccgtctcatactaatgggcatttccggagaggcgggtgttagggatatgccagactttttccctatccggcggattgatcacgcgccgcaggggaccgttcacggaaaaatcccggatttttttacgggcacggtttccacagggcgcgatgggaccccggcagtacgtcctttgccggcatgactggaatgaacctctttttcctttcccggaacaggcggcgcgttctatgctttactatctctaccggctttcctttatgccggaaggaccaccttcaacatttggaaaagcatgtatgacgtcgtagccctcggagaactgctggtggacttcaccccctgcggagtgagcgcccaggaactgcccgtttaccaggccaatccggggggagccccctgcaatgtcctctccatgctgtcccggctggggcgcaggaccgccttcatcggcaaggtggggcatgacatgttcgggaaaatgctccggcgcacgcttcaggaggaaggcattgacgattcggggctggtctcttcccgggaagtcaacaccaccctggccttcgtccagattgacgaacatggcgaccgtgatttttccttctaccgcaatcccggcgcggacatgaaactgacctccggggaggtggacatggcgctggtggaaaacacgcgcgtattccacttcgggaccatctccatgacgcacggcgacgtgcggcgcgccacaaggcatgccgtcagccatgcccgggagaagggtgccctcgtctcctttgaccccaacctccggcctcccctctggcccagcctggagctggcccgggaacaaatgcgctacggctgcggcgcgtgcagcgtcatgaaaatagaggtggaggaacttctgttcctcaccgggtgctcctccatgaaagaagggctggatgccctgaaaagggaattcggcaatctccgtctcatcctcgtgacagggggcagggaaggaagctgggcttcctatggagacacgctggtttaccagcctacgttcctgaaggtcaataccattgacacgacgggcgccggagacgctttttttggttcctgcctggactggattctggaaacagggctggaaaacctgacggagggacagttggcggacatgcttttattcgccaacgccgccgcgtccatcgtgacgacgcgcaagggcgccatccgctccatgccgaaccgcgtggaagtcctggccctgatggcagggggcgtttgaaaggcgtcgtaaatacacaacttccttcattggtttttacctgaactgtttccagcgagtaaacaagagggaggacctttcatttcttgcagcacattcccgtttcgtgtcgataaaagttgtataaatatactgcggtttgtcttgcaattgtcgataaacaaaaaccgcaagcgcttatgaacagcaacttgcggtataaaagggatggtgctcgagaggggactcgaacccctacgtcttatcgacactagatccttagtctagcgcgtctaccaattccgccacccgagcatgggtgccttaaggcggggagtttttagcgcagaggaacgaagatatcaagctttttcttcttttttatcctttcgattccgttttttgaagagggattttcttagcggaccgggagggaggtagccacgggcatgatggccgggcgcagagtgacggccttggtgtcatatttttccgagggtttgaagagccagccgggatcggtgctgacagcttcaaacctggtcggcttgaagatgggcagcctcaggttggagttgggctcgtagccgtatttgcccgtgtacttgccgtagaccctgtattcatagttgttgtcataggcgtagcgcgggctcccggcgtattccggcaggcggtccggggtccggcaggagctttcatccatgatgacgagctgggccgttctccaggtctggcccggctggcgcaggtacccccagaaacgcgttgccggcacatggtaacggcgtccgacgaagtagttgcccctgggttcgcgggcgatttccgcattgcgggcgttgatgccggcgatgtctttttccagggagttgcactgggtcaatgcgggaaggaggacggcccccagcaggggaagcaggagtttgttcatggctgtgatggtgtttttttcttgtttaagagcgtttgaatggcggcggaagccgcgaagaagccgaaggtgcccgtgatgtgggtgatggagccgaatccggagtcacagcccattttcccctggaattccgggtcgcgcgtgcaggaggtttctccgtcgcaggtggggtagacgggagtttcctgggagaagacgcaggggattttcagtttccgggctttttcccccagcggtaggccgtagtcttttttgagcttgtagcgcaggctggagagcagggggtctcccttggtgcgggagaggtcgcctatttctattttggcggggttgacgcgtcctcccgcgccgccgcaggtgaccagcggctgtttgctgcggtagcaggaggcaataagatgggccttgggaatcagggagtcaatggcgtcaatgatgacgtccggtttcgtctccagcagtttttccgcattggaggccgtgtagaagctgttgatggagatgatttccgcctccgggttgatttgccggaggcgggcggccatggcttctgtcttggactggccgatcgtggtttccagagcgtggatttgccggttggtattggtgatgcagaggtcgtccaggtccatcaggataatggcgccgacgcccgaccgcgccagggcttccgccgcccaggaacccacgccgccaatgccgacgacggccatgcgggagttcctgaggatgtccagcccgctccttccatacaggcggcctatgccgccgaatctggcttcatagttcatggctgcgtgtttgaaccggagtggggaattaaggagaagacgggtgccagagggcccttccgtttttccatcgtgaagatataatagcggggggaagccgtttgttccgggcggcaggaggcgggaaggcctgcgccccggttccagcagatgaggcaggtgtttccatgcacagcaatcagcatgtcccatccacccccgttttgctgggggatgccgtcttttttatcctggtagcgtacgatgccgtcctgccggacggtaaagaggaccatgcgtccgcaggagggcatggcgatggcagccgtatttctgcatgctacggccagttttccgttgttccaggagagggtgacgggctgccggttatcccgcttttccgtgagggtgagtgagggatgctgccggagcaggctgtactggagcgccggctgtccgtccggtgtgaggaagcaggatgcgggaagccgatgccagccttccctgtgggccatgttttggtagtccctcacggcgtttccgttgtgtccggaacatccgcagagcgccgtcaacaggcatgataagaggaaggcggtggcagtctgcatggtcaggaggccgggttttccacgattttgctgatgcgggcgatgttgagggccctcccggtggcttcatccacctgcacgacggctccgcagaggcgcacgggccagttcgccacagggaatttggccggcatggaggtgcggaagcgttggataatgggttcccgttcccggcccagcaccccgacggcggggccgcacatgccggcgtccgtcaggtaggcggtgccgtgttccagaatggtttcatccgccgtctgcacgtgggtgtgcgttccgatgacggcggagaccagtccgtccagattgtagccggtggagattttttcactggtggtttccgcgtgcatgtccacaaagatgacctgcacgccttcttcctccctgagtcttttggcttccgcttccgagatgaggaaggggttttcaagcggcggctggatgaaggaacgtccctgcacctgcatgacggctatttttcccctgggcgtttccaccaccacgcttccgtgtcccggtgtcccctgcgggtagttgacggggcgcagcacgcgcggttcggagtccagccaaggagccagttccgcctggtcccatacatggtcccccgtcgtgatgacgtccactcccgcatgcagcagttcctgcgccagacggggcgtaatgccgcgccctgcggccgcgttttcaccgttgacgatgacaaagtccgccccatgctcctttttgagttccggcagcatgtgcttcacggcggtgcggccaggttcgccgaccacatcgcctataaagagtatggtaatcatgaagtgggacgggactggtgcggatggcggtttttactgctcttccttggtgacgggaaccaccagcacgggcacgggggatttccgcatgacggagctggctacgctgcccagaaagacggtggaaaggaagccgtggttgtgcttgcccaccacgatcatgtcaatgtggtgtttttcagcatagttgatgaccgcttcgctgatttcaaattcgtcttccacagcctggatgatggttgcgtccgtcagccgggagagtttttccgccgttttttgcagatggttttttgcgatggagatgacttcgttttcctccgtctggtccatcacggggacaggcacttcatccggcagcacgccggagacttcataacagatgctgggttccacaatgtggagcagatggatgatgctgtcgttggggcaagccagtttgccgatctgatgaatgacggcgtccgtggcgttggagaaatcaatggctaccagaatattcttcatatcttcctgtataacattccgtgcttttccatgccactaaaaaacgtgtgctgtccccggttctcccggcattccattcccggttcagatcaggcccacggcccggcgcaccctgtccagcactacggaggccgtttcccgcgccttgcgggccccttcttccagcgtccggtgcacgtagtcctggttggcttccagttccgccctgcgttcgcgcgcgggacggaagtattcccagtaggcgtcaaagaggcgttttttgaagtcgccatagccgcagcctccgtttttgaagtcgcggaccatgtcttcatagccttccgcagaggcgaagagcttgtagagctgcaggatgacggagccttccgtgggtttgggatcttccacaggggtggagtccgtggggattttcatgatgagcttgcggacggctttttcctcaccgaagatggggagcgtgttgttgtagcttttgctcattttttgcccgtccagccccggcacgatggccgtgctttccgcaatgagcgcatccggcagcttgcaggtgccttcgccgaattgttcgttcattttgcctgccaggtcgcgggtgacttccaggtgctgcttctggtccttgcctacgggcactaggtcggagtcatacatcaggatgtccgccgccatgaggacggggtaggtgaagagggcgttgctgggggagaaccccttggcgattttgtccttgtaggagtggcagcgttccagcaggcccaccgggcagacggtgccgagtatccaggccagttcattgacttccggcacggaggactggcggaagaagacgcattttccagggtccaggcccacggccagaaagtccgtcgccaggtttttgcagttttcccgcagggcctccgcgtcgtgaacggtgctcatggcgtggtagtccgccagaaagtagtaggattctccgcgttcctgcatgcggacggctggttccatggctccgaagtagttgccgacatgcagcttgccgctgggttgaagtcctgtgatgatacgcattgcgcgcaggattttgcctgttcgcgcccggcaagtcaagaaaggggagagtcaaagactggcggggaggctggccgggcgcctcgcctgttccggtatgcgtcctgcgtttgttctctctctttttcatgcctgaccggagcgttttcttgggcatgaagagaagaagcggcggcgggagtttattctccccccgcttccagcgcttccagcacgttgtgcacgccgtccgcaaagcttgggtagagcggctcccagcccagggccagaaggcgggagcaggagattctctggctggaaaagccgcggcgcgcttccgcctggagcggttcgggctgtggcgcgggcatgcccagcagtccggagaggtaggagtagatttctcccagctgcatgggggtgcggtccgtcaggttgtagatgccggtgggcggttcccggagcgtgcagagcaggtgcagggcggccacggcgtcatcccggtggatgtagttgatccacctgtccatgtttccggggagggccgcgcccttcttgcagtattgggagacgagcacgcagcggtccggtccgtagagagctcccagccggacgacggtgcctcccgcggccagaaccgcctgttccgcctgaatgaggaggccgctttttccggaggcggggtagacgttatgttcctccgtgatccagcgtccgtccgtgatgccatagacggaggtgctggagcagaagatgaccggcgttccggggaaggcttccagcgtgttctgcgttccgcggatgtagaggctgcggtaggcttcctctgagcctccccgcgtgctggcgcacatgacgatgatgtggggggaggggatgcgggcggccaggctgtgcatggaggctccctccgtgacgtccgcttcataaatggctttctgtgcgtcaatgtccgccgtaagggccgtgtgaccggctttccgcaggctctccgccagcgcttttcccaggtagcccgttcccagaatgaggacggcgcggggttctgtacacaggaggccggtcatgagtctttgcggaggtgtttgagttccaacagcgtttcagcccgggagacatcttccggccaggtgattttgggatttggctcatggttgtgcaccagccgcgtgggatggccgatgagctgcagggcggttacttcatccgtcacctgcatgttccgttccgtgacttccacatacgcatccagcaggagcgggtattggaagacctgcggggtttccatgcaccacaggccgtcccggtccacctgctccggcagggtgaagcgttcttcgtccgcgcgcttcaaggtgtccgtcacgggatgcgcggaagcggccgctccgcattccctggcagtctggatgcagcgggagatttgctctaccgtgataagggggcgcgctccgtcgtgcacggccacaagttccggcgtgtagagaagggctgccaggccgttctgaacggattcatgccgttccgctcctccgtccacgcgggtgacgggtatttccgtctccaggtccgcagcatcaacggcgcggaagcgctcttccgggcagacgaccacgatttccgtgatttcccggcagttggcaaaggcccggatgctgcgttccagcaccttgacgccgtgcaggggggccagcagcttgtcaaatccggcgcgccgggaggacccggccgctacaatgatggcggcacagcatttcatgatagtctggctgacaccatgcgggccagttccttgccgttgaccctgccggcggtgcgttcctgcatgagtttcatgacctgtcccatgtcttttttggtggaggctcccgtttccttcaggacggcttccagcatggcctccgtttcctctgcggtgagttcagcaggcatgaattgcttgaggacggcgatttccgcttcttccttgtcggccagttccgggcgtccggcggagcggaattgttccgtagagtcttcgcgctgcttgatttgcttgcggaccacggccagttcttccgcttcctccaactgggttcccaggcctcccttggcgatggccgtgttcgtcagagccgtcttgagggcgcgcagcgtgttgagggtgacggagtcttttgctctcatggcggttttcatcccttccatgatttggtctgaaatcttgctcatatccccattaactaagcgcatccccacgtgtacttcaagccgtaaattgaaaaaggccgccagcgcgggaaatgcccgccggcggcccggagagggagttgaagagcggaaccgcccggtttattttttcccgccgatgggcatgatgtggattttcttttccgccatgcccggaaccacgatcatggagtcatacaggataaagtccgccgcgccttcaatgggaccggtggctgccggcgcggaacgccccgttttcaggtccagcctgcggatggcttccggttttttgtccttggaccagtcgctgtagtaaagggcgttgtcacggtacaccaggccgtcgtattgcccccgttccttggagagttccgtgacttcccgggagacggggttgatggagagcaggcggccgctgggcttgcctttttcatccgtggcgtattcgcagaggtagatgacttttctttccgggtcccaggccaggccgttcggcttgtagatgggctgcttggtgaccagctccccgtaggaactggtgttcgtgtccacgtagaaaatctggtcggtatccgtggaggagaccatgagcctgccgttgatgaacgccaggtcgttgagaaatttcatgcgggagggggacaggtccacatacccctcaatggtgccggttttggcgtctatcttgtagaccatgtccacatccgtgcagtacaggaagccgtcctggtacaggagccccttgggagcgtccagggtgtccacgtccgtgatctttttaggttccgtggagccgtgcgggataacgcccaggtagccgtccttgtccttttccgtgggcgccagtttggcgccgatgcaggtgaagtagatgttgccctccgcgtccgcagccacgctttccgggtggccgtcaatggcaatggtggctttttccagcggaggcagcggtttggccggctccggctgttttttggttggaggagctgccagcgcgctgcacgccaggcagagaaggagtagtgttgctttcatggggttgtacggtgtaaaaggcttggaatttatggcacggaagcaggagaaaagcaagccgtaggagctgccctgcggacgccgtgcggaggtgcgccccgttcgcgcatgcgtaccggggcgctccgggtcagatggctcctgcgtccagattgttgggctggggcatgttttccatgcggatggagcggttgaccgcgttcaggtaggcccgggcggaggcttcaatgacgtccgtggaggctcccttgcccacgatgggcttgggctggccgaagtccacgtgcaccgtgacttcccccagggcgtccttcccttcggaagcggcgttgacgctgtagcctttcagcgtgcctttgcgcttggtgatgcgttcaatggccttgatgacggcgtccaccgctccgttgcccgtggagctgtcttcaaattttttaccttccttgagcagtcctaccgtagccgtgggccgggcgtggctgcctgccacgaattgcaggaagtccagctcccacaggccggaggaggcgtgcagggagtcgtccacaatagcggacaggtcatcgtcataaacgaatttcttggagtctcccactttcttgaagcgctcaaagacggcgtttacttcctcttccgtgagcacatgccccagttgttccagcctggccttgacggcggcgcggccggagtgcttggtgagcgggagttccgtggctccccacccgaccgcctgcggatccatgacttcataggtttcccggcagttgaggatgccgtgctggtggatgccggaggagtgggcgaaggcgttttcccccacaatggccttggaacgctgcacctgcatgccgctcatgcgggccacaatgcgggaggtgcggacgatttcccgcgtgttgatattgtccgtgacgtctccgaattgcccggcgcgggtgcgcagggccatgatgacttcttccagggccacgttcccggcgcgttcgccaatgccgttgatggtgccttccacctgccgggctccggcgcggacggcggccagggagttggctacggccaggcccaggtcgttgtggcagtggacggagatgacggctttgccgatgttcggcacgttttccttgaggtggcggatgatgcggtagaattcgtccggcgtggtgtagcccacggtgtccggaatgttgacggtggtggctccggcgtcaatgacggtttccaccaccttggtcagaaagtccaggtccgtgcgggaggcgtcttccggggagaattccacgtcctgcacgaattgcctggcgtaggagacgccttccgcggccatgcgcaggatttccgtttccgcctttttcagcttgaactgcatgtgcagcttgctggtggccagaaagatgtggatgcgggcgcggtccccggcgggttccagggccctggcggctgattcaatgtccgccttcacgcagcgggccagtccggcgatgcggcattttttgatttcactggcgatggtatgcacggcttcaaagtcgccgtcggaaatgcaggggaagccggcttcgatcacgtccatgcccagccgttccatttgacgcgccacttccagcttttcgcgtaggttcatggatgctccggggcattgttctccatcgcgcagggtagtgtcaaaaaagtatatttggtcggacatgggttgatgatattaagtcccggtataataatgttttgctccggcaacgcaagccctacgcgctacatgccctcacggaggggggaatgaacagggcgtaaggccgctgcgggtgaagaatgacggaaccgttctttgcctgaaaatggaaaagctgtaggatgagagggtgaaaatcagattttacctgaatgaccaggcggaacgcatcatggccctgtggagtgaaagccgcggggagtacctggtggcggattccgtgtttgcggaggtggatgcctgcatttgcggggaaacggattccagcggagaggagatgaagcgcatcgctgcgtttctggataatccagccgccaaggctgtagatcctgactggatgattgataccgcgctgccctgttctccctccaagctggtgtgcctgggaaagagctatgcggaccacgcgaaggagtttgacggcgatcccgtgcaggagccggccattttcctgaagtccccttccgccattacctcctgcagcgacgtcgttttatacccgcccgggtgtgacaagctggattatgagattgaactggccgtagtgatcaagaatgtgctgaagaacgcttctccggaggaagctgcgctggccatcagcggctataccctgatgtgtgattattcggaaagggccaaccagctggaacatggcggccagtggaccaaggggaagagctacgacagctttgccccgatgggccctacttttatttccgcggaggaactgggggacggctctggtattccgcttgaattgaaggtgaacggggaagttcgccagcagggcaatacggacggcctgatctggcccgttcctcgcctgattgcctatatttcccgtttcatgaccctgtggccgggagacgtggtttccaccggcactccgggaggcgtgggcatgggaatgaatcctccgggttatttgaagcccggggacgtggtggagtggggaagccccgctttcggctatgcctcccaggctgtggtgattgatgacgaggagtaggccgggcgttcaagcctttcagggagtggagaagggaaaggcttctccgcgcgtggactgtgttttctcctgtcgccggagcatcgtttttccggaggatggccccgccggtttggagtgggcagcaaatactggcggcatccggaagaaaggcattgttttctcttgattcctccgccatggtttagtgaagtggatgcgtgaaaaacgtggttctgtacgtggtgatggtgaccgggctgacggccctcttcgtctggctgaaggggaggaacacggaacgtgttccggcttcctccgccatggtggtgtctccggaggatgacgccgcgcacgatgtcgtgctggtggatgtccgtaccccggaggaataccgcgcaggccacaaggagggagccttgaatattccggtggatgaggtggagcagctggctcctcaactgcttccggacaagaatgccgtaattctgttatattgccggacgggcaagagggcggacaaggcgatggaaaccctcagaaaaatggggtattcccatttggagaacctgcaccggtttgagatgtagccctcggcccgttttgccggtgcgcggagtccggaatgcgtacggccatgccggttccggtttgcggagcattgtttgatgtaaaagcacaggccatgaaatccatccatgcctgttctgtaaataaatcaagctccggacgccttgtagaagaacggccggagcttgatgaaaatgaggcagggtttatgcccgtttgcggcgcatcagcagagcgcccaggcccagcaggccgaggctggccgtggccggttccggaacggaggccagcgccagggcattgatgctgccgcttccgccctgggactggatattgagctgggttccgtcggcagccacgtcgaatgtataggtcaccaccatccagtctccggtatgcgtgttgcccgtgacggtggcgccgttcagcgtagcgccggacccggtggagtagtcgtccaggctggcggaaatgttagagattccggtgccgtcaaggctgaaggaagaagtgttgcccgcaccgtagttgtttccgcgtcccaccagcatggtcagcgtgtaagtgccggcggacaggttgttcagggacatcgtgaagttgccgttggcactgtttccattgatgacgccgcccatcgggttgccggtggtcatatcctggccgaaaacatcgtaaaacttgttgccctggcccagggcggagtctttggcggaaccgtccgtcagaacgcctccgctcccgcagcagacgccgccggtcgtcagggtgatgccggtagcgtcccctccgctggtcaccagtgttccggaagtataggaagaggagctgcccgtggagattttgttcacttgttgtccggattcccccagatacgtgccgtccacaacggaggtgccattgcccgaattgatcccgaacgaaatcagaacggtggaggcttcagccgcaaccgccgctgccgccatggttgccagaatgaataatgtcttcttcatgctatcaatgagatacgtgattggaaatgatagaacacccttcctaggagtagataaatagcgaattataaatccgtgacgtttaaaaatccaaatcaagatttattcaataagtaaaaaggcttttatcccagccttggaaagtgctgttccaccgttgccggatgagactgttttttcccggcaattctggacaatgccacccgggcaggaaccgttcctctccctttcctgacggcaggcccatagaagggagcgggatgaagattcctcctgttccgacgggacggcatttccttcaaagaagaaaaccccccgcatggagtcatgcggagggttcctgtttaattgttgtccgtaaggttattccgccttcggcttgcggggagtccttttacggggagttttggttttcggagccgccttgtccttgacgtgcaggaaggtgagcgtttccgttccgtccgtttccacggcttcaatcttgtcgcctggtttcacgtctcccctcagcagggattccgccagggggtcttccagcagccgttcgatggcgcggcgcatcgggcgcgcgccgtactgcggatcgtagccgtttttgatgatcaggctcagggcttccgggctcagggccagcgtgatgttcttggtcttgaggcgggagatgagcttgtccgcttccagctgtacgatgcgttccaggtcgtcccgttccagcatgcggaaaacggagatgtcatcaaagcggttcaggaattccgggcggaattgcttgcgcgccgcttccagaatcttttccttcatggcggcgtagtccgcattgtcggcagacatggcgccgaagcccatggcgctctgccgcttggcggaggcggcccccacgttggaggtcaggatgatgatggtgttgcggaagttgatcttgcgtcccagggagtccgtcacgctgccttcctccagaatctggagaagcaggttcatgacgtccgggtgggccttttccacttcgtcaaagaggataacggagtagggcctgcgccggacggcttccgtgagctggccgccttcgtcatggcctacgtagccgggaggcgagccgatgaggcgggacgtggtgtgtttttccatgtactcgctcatgtccacctgaataagggcgtccgcggtgccgaacatgatttccgccaggttgcgggccaggtaggttttgcccaccccggtgggccccaggaagaggaaggagccgatcgggcggcgcgggtctttgatgtccgcgcggctgcgccgcagggcacgggcgatggcggaggccgcctcgtcctggccgatgaccttgcttttcagttcttcctccatgcgcaggagcttggtggtttccttttcctccatccgggccagcggaatgccggtccatttggcgagcacgctcatcacgtcttcatccgttacggggacatagttggtctcgtaggagttgcgccaggtgtccagcatgttctggagttccgccttggcctgtttttcctcgtcgcggaggcgggcggcttcctcaaagagctggccgtccacggccttgtccttgcgttccttgatttcctcaatgcggacttccatctcgctgatgtggtccgggcgggtcatctgggagacgcgcttgcgcgctcccgcttcatccaggatgtcgatggccttgtccggcaggaagcggcccgtcagatagcggtgggagagcttggctgcggcttccacggcctctttcgtataatgaaccttgtggtgttcctcatacttgggctggatgccggccaggatctggatggtatcctccacggagggttcccccacctgcacctgctggaagcggcgttccagggcggcgtccttctcaatgtgctttctgtattcattgagcgtggtggcgcctatggcctggagctccccgcgggagagggcgggcttgatgatgttggaggcgtccatggagccttccgcggagcccgcgcccacgatggtgtgcagctcgtcaatgaagaggatgacgttgccttcccggcgtatttcatccatcacggccttgagccgttcttcaaactggccgcggtacttggtgcccgccaccatcagagccaggtccagggagatgactctcttgctgcgcaggagttccggaacgtggccctgggctatttcctgggccagcccttccacgatggcggttttgcccaccccggcttcaccgagcaggacggggttgttcttgttcctgcggcacagtatctggatgacgcgctcaatttcggaggcacggccgatcacggggtccagcttgccgtcccgggccagctgggtcatgtcccggccaaaggcctggagagcgggagtcttggatttctgctgccgggagtagggaggggaggaaggttcgtccgtcgggatggcgggggattcgttttcctcctcgtcgtcatcgtcgtccgggatgatgttgtcttcatccgcatccatctggtatttgggcgtcagtacgtccagcagctcgcgccgcgcctgttccaggtccacgccgaagtggcgcagaatctgtccggccacgccgtcgccgtcccggatgaggcccaggagcaggtgctccgtgcccacatacgtgtggttgagttcttgggcttcccggttggccatcgccagaaccttgcggactctgggggtgtacgggatgttgccctccgcctggggctccgtgccccggcctatttgttcctccacctgcctgcgcacggcggtaagctccacccccaggttttccaggatggtgacggctacgcccttgcccagcttgagcagcccgaggagcaggtgttcggtccctatgtaatgatgattgaagcggtccgcttcccggcgcgcatgcgccagcacttgttgcgccctaggcgtaaagttgttcatgtattgtaaagaagttttgttgttgcatcagtttccggaaagttccttccggataatgtccgcacggatctggtccctgtcttcgggagttgtctggtccgtggtggacaggcgggccaggtgggccggctgaatgttcagtatggttttattgacgttttttaatgcctggtgggaaaagatgtccagggatgctcccatccggaggaaggagagcagcgccagcgcctcctgcgtggatagcagggtggcgttggtcaggaggccgtaggcgcgggaaacgcggtcttttacctggagcgaggaagcctggagcagccgcctgcgggcgttccattcctggtgggccaggtcggaggtgaagcgggtcatgcgttccacgatctggtcctcgctgtctcccagcgtggtctggttggaaatctggaagagattgccggtggcttccgtcccttctccgtacaggccgcggacagtgatgttgagctgcacggccgcctggacgacctgctgcatctgttctgagatgaccaggcccggcaaatgcatcatgacggaggccctcatgcccgtgcccaggttggtggggcaggcggtgaggtagcccagccgcgtgttgtaggcgtacgggagcctggcttccagttcggagtctattttggagatggctccccatgcttttttaagctggatgccgggcaggatgtactgaaggcgcaggtggtcctcctcattgaagaggatgctggcgttctggctgcgtgagatgagaacggcgcagccttccgagcgcgcggccagttcccgggaaatgaggtggcgttccaccagcagctgtttttgctgctgggtgagtccggagagttccgcgtaatagcctcccttcatgacggggatttggcgcgcttcactggaggtgagcttcagcgtttcctccctctgctggcgcgtggcccagccgggaaaaggggtggcggtcagattgcgtgccaggcggatgcgggaggtgagaacgatgtcgtgttcatcccgtgattccaccatccatttggcggggttgtttagtaagtcgtcaaagagcatgtacgttaattggtcggcgtgcgcaattgcttgatttgatcgcggagcttggccgcgcgttcataatcctctcttgccactgccagggaaagttgttgttccagatcactgatggtatgggtttccgtttcgcgcttttccgcccgttcgggcgtttttccgtgatggtgggaatcaggctgaatctgggtgagaagagggagtatctcttcttcgaagacgttgtagcattcactgcagcccaggcgtcctacatttttgtaatcctgaagggtgaaggagcagatcgggcagcttgtgagcggtagggactgcagggccggaatgggggcggcggggtccgccgcgccttccttgccgaactggccctgaaggttcgggaacagtttctccgccagatcaaaggcgtccgggtccagcaggccccgctcctgggcgcatttggcgcagaggcagaatttggtggatttcccgttgatgatctgtgtcaggaacaccgttgccggtgcagagcatatctcacattttttcacaacccgcattataatggcgacccccacggcggactagtagtctgcgtgtcatggattgtcatgaaaacgggccttgttattgtacggaggaagaattctttctgcgctgttttagaagcccgcaccgtgatgaatacaagtaggctgcgcagaagaaggttcccagcaccagaatgatggttgcgcccaggtgccagcccagcgggaaggacaggtaaaaggccagcaaagagcccagtccaccgatgattccgcccccccagaagaggtgggaaggcttgttggtgagcatgtacaccgtggcggcgggaccgacgagaagccccagcgtcaggaacgcccccacggcctggagggaagagacgagcaccaggatgatgagggtgaagatgccgtagctgatgaggcgggagggaatgcccagcgtggtggcgatgtccgggtcaaagaggtagatcaggatggggcggcggaagagaagcaggatcaggacgctgacggaactgatggcgaaggcgatccacaggtcggagtcggacaggctcatgatggagccgaacagccagtcgtcaattttctgttgcaggcccagccgcaccagtacgatgaaacccgcggcgaaggccgtggtgtgcaggatggacagggcggtatcctggttcagccgggacgtgcgggagacgaagagggaacccaggcccaccagcagggcggccaccacggcccccgtcaggaggctccagcgggtgaggccgaagaggagcaccgccaccgctatgcccggcagcagggcgcaggagagcgtgccgatctggagagccgattttttcaggatgaccagcccgctgacgaagccgttggcgaagccgatcatgacgcatgccagcagggagcgctgcgcgatgggttcgcggaggaattgaagaaagtcgtccatcatgaaacttgggtttccggttgaggttccattccatacgtctcccggatgcgtgagggagcaagcacttcccccggggggccgaaggcgaccagctcgcgattcatcagcaggatggcgtcaaaaatgtccgccgccgtgttcaggtcgtgatgggaggcgatgaccagccgtccttccgccgccagggaatccagcagccgccccagggactggcaggccggggcgtccagccctgtgaagggttcgtccagcagcaggacgtgggcttcctgcgccagggcgcgcgccaggaatgcccgctgctgctgccctccggaaagttctgaaatctggcggtccgccagggattccatgcccagcgcgtgaagggatttttctacgatgtcccggtcatggcgcccgaattttttccacagtcccagggacggatagcggcccatttccaccagcgcgcggacggtgatgggaaaggaccagtccacgtcggaacgctggggcaggtaggcgatttctcccggcgtatcgtgaagagggctgccgttccacaggatttccccggaatcaggacggagcagtccggccagggccttgatcagcgtggattttcccgcgccgttggggcccatcagggccagcgtgtggccgcaggtgatggaaaagctgatgccgtccagggcaagaaggctcccgtaatacacgctgaggttccgcacttccagccggtggcggtccgggtggctggcatgcgcgccccagcagatgtggtcctgggagcagtggggggctggactgtttatttccatgagaaggagtagctgtcgttcagggaagggccgaaggaccagcgggtggcggaggcggacggcctgccctccggttccagttccagcgtaacgggggtgtccggcgtgccttccggccagcgggcggaaacggtgagcgtcacggagccgtcttccagcggaaggccgcattccacttcttcatgcaggccgggtgtggaggactgccagaggacacggcttccatgggagatggaaagaaattccggacggtgggcgcacctgaccgtgatgaccgtgggaacgtccgcggcctgcgccgcgggggaggagaggtccgcttcctgtgctccgggggtgcctgccgtcatgttataaaggaagaaccccagcaggatgacgactcccagagtagggaaaaactggcgcaggggtgtgctggtcatggcctgggggacggggaaagggcttccttgatgatgccgacgttttgcttgaacatggactcgaacgtatggccgtccggagccagcccgtcggtattgatcggcttggcaacggggatgttcagggatttggcgatctccgtgaggctcttggggttggaggaatattccgggaacagggcctttaccccggctgcgcgcagcttcttcagcgtggaggccagctgggcggaattgccttcgtcttcacggctcaccccctggatgctgatgctgcggaagccgaattccttgcagaaatggttcatggccgcgtgccccgtcaccaggatgcggtccgcttccggaatgtccgcaagctccttcctggcccaggaggaaagctggtccatttttctgttccaccgggccagtccggccttgtaatcctgctcatgggccgggtccatccgcgtgagcgcggcggccagggcgcgggcggcgcgtttcatattggccggggtgtgccaccagtggggatcgttggggccgtgggcgcagcagtccccgtcgtgcccatggtcatggtctgcggtgtccgccgccacgggaacgtccggaatggaggcccccaggtccagaatttgcgccctgccgcccagcgcgtctttcaacttgggaaggtacggctccagattcttgccggaggccagaaccaggcgcgcctgccctgcggcggcgatatcctgcggagcgggttcaaagctgtgcaggttgccgttggggcgcagcaggtccgccacctgcacgtggctgccgccgatggcgcgggccatatcccccagaattgggtgcagggccgcgattttcaggccgggggcgtcctgggcctgaagagtgcagaacaggcccagaagacacagaaaaggaatcagaatgcgccggagcatgttccgcattatgaaccgcccttcaagtgatgcaatggtcaaatttgtcttccaaagtgagatgacgctaacttttcggggcctctccctggctcttctttttgttcctcagcttcatggtgaacttctggtacaggaaggaggagatgagcacgatggcggccagccccaccaaggctcccacgcggtacagttgcccgaggctggaaatgtcataacagacgactttcagcagggtgatgcccagcagggcgagtcccgccatgcgcaccctggaagacctgatgtcaaaccccgtggcgatcaggcccagggcaaagaggctccaggcaatggaaatggtgaggtcctgcgccacgctgctcccgaactggatcatcagcggacggtctcccggtgcggcgaagccgcaggatatttccgtattcatccagatgaaaagcaggatggccccgaaaatattcagggccgcgacaagaacgcggaggccggagctgcggccccccggcaggcgtggcgtcactttcttctggacccaccaggctccggccatgcagcagaaaaccatggtggcgaacatcgtgcgcagggccggcattccggcagggtcaagttgcacgaaggcttgcgacaggccgttgcggacgaacaggaaggccagcaggaaaaatcccgtccaggccagtctgggcaggggaaatttgccgcacagcagcagaagggccagcccttccagggaccaggctacggtcaggggggcgcccgtccattggaggccgatggccagcgtcagcatgccgatggctgctccataataaaagcagaggatggcggaacgcttcaaaagcgtttcctccggtagccgccgcagggccagggccgccagcagcggaggcgccgcacaggcaagcgcgacggtggaatcccagaaatgggtggcctcaggatggtgggccgttccgaagagccaccaggaaaggtagaagagggggaatgccagggcggaggcgctccaggccagcaagccgctgcggaaccgccggaccagcagcaggggcagcaggaagatcgccaggaaaatcaccgcggaaccggcagggtggatgtcctgataggacgccgcaatcgtgtacccggccgccgcggccatcagggcctgccctctccggtgccatgccgccattccgcagaacgtggccgccgtcaggaaaacgtaaaaaggggaaggtgaaagcgggtgcatgaccagcagccacgcgagagccgccgtggcgaagcaggaaatcctgacgccgggctgaagctccgccaggtaggcccctccggaaggcgtgcgtgcggacagcaccgcataagacgccggaatcatgaacaggcagaaaaggccctggagctgggaggatatccagagggcagattgcgaggcttcttccgcggaagactggtaaaaatagaaaatggtgaaaagccccatgggaagaaagcaggaccaatacgtgcttttggcgcgggccagcgggagcagggcgatcatggggagcatgcccgccagcaggagaagcaggtgggaggaaggggaaaggaaccggaagctgcactccgcctgaaggcggaatgccgtcaggcaggtgaccgcaatggcgcagaaggccagcaggaagggacctcccttccggtccggttcagcctgccgtgtgccggcataaaggccgtagcccccgtacaggagcagggtgcagatggacaggatgacgacggcgagaatatgggaggggccgccgtattcgtcaaaccagcccatcagcaggatggtataggcagccagtccggctcctccggctcctgtccacctggttgcggctacgacggcgagcaacccgacgttcaggatggtcatgtacaggaacagggaggccgtatggtcctggccggtggacaggatgaccggggtcagaaaaccgccgatgatgcccaggaaggcgattatgcggaaccgcaggcgcaccgccaggatgaaggccgccgccgtggtggccgccagcagaacggtcgcgatggccgtcgtgaagaagggaagctcgtaaaacatgcgtccggcgcaggtagccaggtacaggaccaggatgcccgtggaggtcagcgtgccggaaaggatggggtacttcttcctcagccgcgacaggccggcgcccagcaggccggcggcagccagatacgtgagggttaccctccattccggagaaatcagatcattgtcaatgctgtacttgacgaagaacccggttcccagaaacagcacaaaccctcctatccaggagagcagcttggcgccgatgaagtattcccaggaaaaggacgcggggcgcgacggtgcgggcctggcgttccggaccggctgcaggctgttccgggagggaagggcgcaggcgggttcccgtaccggggcggcggcaggaagcgtacggatgggctgcaccggactttccacagggggcggaaggctctttctggtttccgcggggggcctctggggggaggaacgggaattcagacgttcctttaatccggcgacttccgtttccagagtgcggactttttgttccagagaaacgacctggcaggccttcacaaaggtgaagaccattccggaaagcaggccgaggaccagcagaagaatgaaaaattccatggggagggaaggggtagggaaaatgtattctacaccggaagaatgggactgcaagacgcaaaaaggtacatggccgcctgtcctgaaagagccgcacggaaccgtcggctgaaggccgtcccggcggtggatttcatgcggggggcggaatgggccaaggcggcacaggaaacgttcgcggggaagagaccggaaggcgcgccgcctggaagcccccttccgcgcctttcccgggttgacgtattgaggaatgggagcggacggttttttcttgaggtggaaagtgttttctgattccattatcgcgcatcatcatgaatggttttcaacttcttcaatgtggtttgagcgtggctgccctgctgggcggctccgcccttgcggcgtcacctgccgtgtacccggttccccagcagtccaatctctcctcccagacggttgctttctccggaaagccttccgtggtgattcgctccgccaagacggcggccagcaagctgctgaacggcgttccggaaaaatccggggcctacaagctggtcgtctccccgcagggcaaagtggccataggcgcccatgacgagcggggcgctttttacgccatgcagacgctgcggcagctcggcacgaaggccggcggcgaaggcgtgaccttgcccgtaggggaaatcacggactggccggacatcgaattccgcggaacggtggaaggcttctacggcactccatggagccatgaggcccgtttgagccaactgcgcttttacggccagaacaagatgaacacgtacatctacgggccgaaggacgatccctaccactcctccccccactggcgggacccctatcccgcggaccaggccgcccagatcaaggaactggtgaaggtggcgaaggaaaaccacgtggactttgtctgggccatccaccccggcaaggacatcaagtggacggaagaggacatgaacaacgtcatcaaaaaatttgagatgatgtacaagctgggcgtccgttcctttgccgtgttctttgacgacatcttcggcgagggaaagaggggggacatgcaggcgctcctgctcaacaagatcaacaacgaattcgtcaaggtgaaaaaggacgtcacccccctggtcatgtgccctacggagtacaaccgcggctgggcggactccaagccgggaacctacctggacattctgggcgaccgtctggacccctccatccacgtcatgtggacgggggactccgtctgccatgacatcacgctggaaggccagcagtgggtgaacaagagaatcaagcgtccctcctacgtctggtggaacttccccgtaacggactactgccgctccaacctgtgcatgggccgcgtgtacggccttgccacggaaccgggcgcgaaggaatccatgggcggcttcgtctccaaccccatggacaagccggaggcctccaaggtctccctcttcggccttgcggactacacctggaacatcaacggcttcaaatcggaggaatcctggaaggaaggcgtcaggcgcctgttcccgcaggcggcggaagccatgcaggtctttgtgaaccacaactccgaccagggtcccaacggccacggctaccgccgtgaggaatccgtggaaatagaacccgtggtcaagcgcgtgctggaagccgcccgggaaggcaaggtggccaaagcggatacggccctgctcaagaaggaattcgctcgcatggccgccgccgcgcccgtcatccgggccaaggcggacaacccccgcttgatgaaggaaatcggcgcgtgggtggatgcctttgaacaactgggccgcgccggccagcatgccgtggcggcgctggaggaaaacaacaccagggacgccgtgacccagctggtgcaggccacgcaggccctggcggccatggacggcatttcccgccgccacaaccaggaaggccagttgtaccgctccgtggtgaaaaccggttcccgggtgatgacccccgccgtcaatgaactggcggacaccgtttccaaaaaagttttccccgctattgcgggcactccggccctttcccccaagcccctggtcaaggggggcaatatggacaaggcggaactcttctgtgacggagaccgcggctccttctggcattccggcgcttacggcgagccgggagactggtatggcgtggactacggcatgccgattcccgtgcggagcgtggaagtgctcatgggccgcaatgacaaggacggcgactatgtagccaaggggcagctggaaggctcccgggacctgaaaacatggaagccgctgggaccggaaacctccggcatgcaggtggtatggaaggcgcccaagcccgtctcactccgtgccgtgcgctaccgcgtcattgaaccgaagaaaacggacaacggccgcgccgtctggaccgccgtgcgtgaaatagccgtcaacacgcctccttcagccatggccgcctccaacgtggcggggctggaaggcgtctccgtgcagaaatccgacaaaatcgtgcgcatcaaccgcgtgatggaaacgcacaaaatgaagcccggcgaattcatctccctgcaattggaaggccccacggacgccacttggctggaagtcaacctggaacgggatgacgtcaactcctgggcggaagtggagctggacgtggaaggctccgccaagcccgtggtgcagaagctggacaagcagggtaaaaacttcattgccagggcgaaccagctccccaagggaatcaagggcatgaaactggtcaacaaaagcggcaaggaacaggacatcgttctgaacatgttcaaatttgacgttcccccgtcggaccccggcaccagcctggtctccctgagcgacaggaacctgaaaacggtctaccgtgctgacaagcccctggacgtgatcgtccccaatctggacaaccccaaggctgccaaggtagtcgtggtagggtccgccgccttcgccatccaggcgcgccgcggcgagggatcctggacgccggtgggcaagcggaacgccggacccggagcttccgagtttgccattccggccgggaccactgccgtgcgcctgacctacaaggccccccagccggacgcgatcatcaatgaggtgatcttctcctcccggaaatagttgtttcaggcgctgatgcctgatgctgcggctccgtccggattttccccggacggagcttttctctttgaaaagatggaaatgcagcgtgaaggccgtttccatgcatcatgggggaaggaggaacccgcattccggcgggaacggcggccattctcccggaaacaggttaggcaccttcttcttcccgctttggcagcttgttgtggaaacaaccttgaccctgttggatgcggggctaaaatactgccatgacaccgggctttcattggactctccgcccctccgtcagggaggatgatccggtcttgaaagcgtttcccgcagaactgcccctgctggtcaaacagcttctgctgcagcgcggatttaccggaggagcggaaactgacctctttctggagcccaggctctcccatctgagcgaccctttcctgatgggggaaatgagggccgccgtggaccgcatcttccaggcggtggatgaaggggaaaccgtgtgcatttacggggactatgacgtggacggggtcacctccgtggcgcttctccgggccattctgatgtcctatgacctggacccgcaatacttcattcccgtgcgctcgcgggaaggctacgggctcagtgaagcgggcatagaacgctgcctctgcgaatgtgcggaaaaacccagcctgctcattacggtggactgcggcacctcctccgtaaaggaagtggagatgctcaacagcctgggaatagacgtcatcattctggaccaccatgaagcggggccgctgggccgtccggacgccgtggcggtggtcaatgccaaaattgaggaaaacagcccgtatacctacctgtgcagcgcgggcgtggtcttcaagctggcgcacgccctgctgaaggaccggaagctgaaaacctttgacctgaaactttatctggacctggtggccgtggccaccgtggcggacatcgtccccctggtggatgaaaacaggattctggtgcgccacggcctgggaaggctggcgcacagccgccatacgggcctgaaaaccctgacggaaatagcgggcatccgcccttccgactccgccaaccacgcgggctttctgaatgccgcgcatgtgggcttcaggataggcccccgcatcaatgccgccgggcgcatggactcccccatggacgccctggaacttctgctgaccatggacaacaggcgcgccgtgcagcttgcccagatgctggattcgcacaaccgcaagcggcaggaggaagaggaggccatccgtacggatgcggtggaaatgctccacaactcctttgacccggaacgggacaacgtcattgtgctcggttcccgcgcctggcatcccggcgtggtaggcatcgtagcctcccagctcatgaggcggtatcacaagcccaccttcgtcatcgcctttgatgagagcggcgtagggaaggggtccggccgctccattcccggcgtatccctggttcaggccatccaccactgtgcggatacgctggtttccggcggcggccatgacatggcggcgggcctggtgattgaggaagcccgcatggacgacttccgccgggccttcaatcggtacgtctctgaaaccacgacggaggaacagcgcagccccgtgctcaacatagacatggaagtctccttccaggcgctgacgctggacttgctggacagctatgaaaagctggagcccttcggcaactccaatccccagcccctcttcatgagctccgacgtcttccccacggagccgcccaagcgcgtgggaaccaaccacctgaagctcttcatgcggcaggggatggtggaacgtgacgccatcttcttcaacggggcggagcgtgaactccccaatccaccctgggacatcgcctttacgattgaccggaacgtgtaccggggccgcgcctccctgtccatctccattcaggaaatacgttcccaccgggaaatgtagcttctcctcaagggggacgtgcacggttttttctgcggaaaaagtcatgcatcccgccgttcttgacaaaaccgtgtcaaaaatgcatcgtctgccttgttcccccattcagggcggagttatggtaaaaataagcaagatgaacaccctgttccttcaaggtcgtctattgctgcttctcggacggtagtccgtgaagatatcttgatatgcgccggtgagccgttccggcgcgaaggaagtaaacggctggtcttgatttgcgccaaaggaatgattccataacaggaacgttttccgtgcgcagtttccgaaggaacgaacccttaacatttttactgtaatgaaagaacacatacatatttttgatacgacgctgagagacggagaacagtgccccggcgcggcgatgaccgtggagcagaaaatacaggttgccatgcagctggaagctctgggagtggacgtaattgaggcgggcttccccgtcatctcggacggcgacttccacgctgtccgcaccgtggcggaacgtacggaaaaaagccgcgtctgcgggctggcacgctgtgtggagaaggacattattgccgcccatgaggcattgaaggttgccggagaccgggagcgcatccatctggtggtggctacgtcccccatccaccggaaatacaagctggaaaaaagccgcgggcaaatcagggagatggccgtcaaggccgtcgccatggcttccggattatgcggggaagtgcagttttccgcggaggacgcctcccgaacggagccggaattcctggcggaaatggtggaagccgtgattgatgcgggcgccgccgtcgtcaacattccggatacggtgggttacacgatgccggaggaatactaccgcctgatttcctacctgaaatccaatgttcccaacgtgagccgcgccaggttgtccgtccactgccatgacgacatgggaatggccgtagccaattcactggctgccatccgtgccggggcgcagcaggtggagggcaccatcaacggcatcggtgaacgggctggaaacaccgctctggaggaagtcgtcatggcgctgcattctcgcccggatttcttttccggcgcggggaccggaatccggacgaaggaactggtgaggaccagccgcatggtggccgccatgagcgggttgcccgtctcgcgctccaaggctgtggttggggcgaacgcctttgcccacggttccggcattcatcaggacggcgttctgaaaaaccggagcacttatgaaatcatggatccggaggaaattggctggggagctacggaactgcccctgaccaagcattccgggaggcatgccgtgaaaatgcgcctggatgcgctgggcttctccgttccggatacggacatgccgcgcctgtttgaactgttcaagcagcgtggggatcagtgcaagttcgtgtatgacgacgacctggccgccatggtgaacgccattcatgcgtaaatctccgccgtccggaaattctcctcaggatttccgggcggcgttttacaggaagagggaattccatgtaaaaacacgagttctattatatgaggcacggagagatggcaaggttggttgttccatcaataacaggtggactgaatttggtattttatggtcggtgaacctgcttttttcaagaggaaaatatactatgagattgtacggctccctgatggatttaaaaagcttgcatggaatatatgaggatgttgagtctgtcttcgttcagattgactagcttacatgggactgtataatgcccatcaatttgagaaacagggaatgaaagtaaaaatcgggtttatgcagggcgctgaggaatggcagatcgatggttttctatgccgtttcaggaagatagatccatctattcttgaattggaaatagacagggacaacgcagattttcttattgccttcccttggttgtatacctcttccaaagagacatatcttcaatttttacaggattccataggaaaaattacgatcatggatgtatatggagaagccctcgctccagatttgaatttgttcgattatcacatagggtttgattccgccgatcatggggggcgcgttctggagatgccttttttatcctcctaccgtgtccaggcggatcagctgccattggaaaatgtggctgatgtcctgaaccggaaaagcggattctgcaattatatctactcccatggagaagggcatccctaccgcatccagttgttttcccggctttctgaatacaagaagatcaattccataggaaagcatttgaacaatacaccctgttccgttcccagggagtccgatgactggctcaagggaagtattctgttgaaaaacccctataagttttcctttgcgtgtgaaaatgcctggtaccggggttattcaacagaaaaaataatcacgagctttctggcccgctccatccctatttactggggaaatccattaattgaggaggactataatcccagggcatttattaattgccaccggtattcatctctggacgaagttgtagcggaaatcaaaagaattgatgaagatgatgaatcatggctcgccatgatggctgaacccaaacggctcccctggcagattgaacgggctcaggaaaaggaggccagactgaaggcagctctaattgagatatttacttctcccgtggaacaggtgaggagaaggggaaacggattttgcgtcaataactacagggattttttcatccgcaatttgagtggcaggaagaaaacccccagggaaaaattagaggcaggtttgaaaaagtggaacaaaaaactgtttcaccgctcctagcccggaatgctttatgtgagcattggtgcattcagccatcacatggtgcatcagttattttggaaccattataaactgaaaaagccgtgcgtggcggaaagcatgacaaaatctgaatgccataagaaccgtttgcggtggaaaatcttgcaaaatagaggcataggtaaggccactcaagaaaaaatggtaggcccggtagggttcgaacctacgaccaagggattatgagtcccctgctctaaccgctgagctacgagcccgttgaagaacaacgtggagaaacgatagcagaatttgacgggaagagcaaagtttttatgcaggcatcacgttttggatttgcacgcgtccgggaaaggcgttcgggaggttagacttgcaattttgtccagctccggcccttgacaattttatagaggatggcggactgaacggccatttcaaaggcgaagagcagccagatgccccacagagtcatggtttccggggcaagcttgaaccagacccatgtgcagacgacgcggaagaagcccatgatgccgtaggagatgaacatgaccctccgcgtgtcgcccgcgccgcgcagggacattttcatcacgatgcaggcggcgaagaagggctccaccagcagcatggtgcgcagcacgggaatgccggtgtcaatgagcgtcatgttgccattggagaatatctccatgaagagggaggggaaggcgcagaagagcacgcccagccccgtcatgaagatgatggcgtaccgcatgcatttccagatggtgatgcgggccatgagcgcgttccgggcgcccaggtactgccccaccagggtggaggccgccatgccgatggcgaatccgggcaggaagcttagcgattcaatgcggacggcgatgttgtggacgcccagcacgcccttgatgggcagttcgctgatgatggagaggcagaacatctggatgccccacatgccgaagacttccacggcctgcggcagcccgattttcaggatgcgcttctgcatgcccatgtccggccgcagatgggagaagctgaggtacagcggcggagcatagtgttccccgcgttccttgacgagttcttccagggattcgttttctcttcccgcgaatatttttttcctgcgccgcagcatgatgaagaggagcgcgcacatgctgatgccgtagccgcagaccgttcccgccgcaatgcctccgatgcgccagccgcccagcggggcgtccgcaaagacgaaggtgacgctgaaaatgacgttgaggatgcccacgcccatcatgatccagaagggcagccgcgtgtctccggagccgcgcagggcggcattgatggcaaagaccacgccgctgaagggagcggcgaacgcggccacatagacgtattgcagggcgtaggccctagcggcttcattcatggtcagcacgtgcgtgaccaggaagccgctgcatgcgaaaagcagcccgcaggagatgatgccggccagcagccccagcatggcggcctggtgcagcccgtgctgcgcctgggggtaatccctggctccggtcatgcgggagacgatggccgtggcccccatcatgatggacccctggatgacgaagccgaaccacatgaggaagacgacagcccccatgccgtcggagatgttgatggtgtcctgcgcgtccagcccgattttggtggcaatgaagaggtcggaggaggtgacgaagaagctcagaagctgttccaggaagggccagaaggcaatgacggcgatctggcggggcagggacagtccggcaagtttaccccccaggcgggcgcgcgacgccctgccgcggataatgccctctctcgcgtcacccgcactcatcgctgggcggtgtagatgctggcgatccccccgttcaggggttccgccgtgatgttgctgtagccgcagtcccggagcaggtcctgcatggcctggccgctgggaaaggcttcaatgctttccgccaggtagtcgtaggcttcccggtggccggtcatccagcctgcaatgacggggaggatgcggtgcaggtaaaaacggtaggggcttttcagcaggttttcaggcagggagaaatccagaatgagcaaatggccccccggccgcagcatgcggcccatttcccgcagggcgtccggatagctggccatgttccgcaggccgaaggcgacggtgactgcatcataggatgcggaggaaaagggcaggttcatggcgtccgcacagaccaggttgtccagtccccgtttggccgctacgtccagcatgggctggcagaagtcggaaccggtcagccggatttccggcatggcgttcaggatggccagggccagatccccggttcccgtcgccaggtccaggaggcgttccggcttccattcggagacgagctgcacgacgcgctgccgccacagcaggtccacgcccatgctcagtacatggttggtggccacatagcgcggcgcaatggcggaaaaagcggctttgacgaattctggattgcgcatgcggatggatagtaaaaaagagcaccataagtgctctttttcatgaaggaaaggggatggggtgtcggacggggctcgaacccgcaacaaccagaatcacaatctggggctctaccattgaactaccgacaccatttaatgttgtggtgcggcagacattacccgtcctcttccgttttggcaagaagaaaatgagtttgatgagttttttagacggaatattttctcaaaaataaaataagggacgggtaaagcaattatttgtttcccatttggaaagttacggggtgtttgcgtggtcttctattgaatcctcctggatttgatgtagacttttttattgtgggaattgatgtaatacacaccgcctttcgggccaacccggtaggttctgttttcccgtgcctggagggcgcggggggaggtgtgttttccgggcaccattccggcacacaggggcgtgtattccggaaggagcggcttgcggctgcattggggcagagagaggagaagaggaaggatggccgccgggaggaaaagagagtgcttcatcagagcgttattatcttttccagaaggttgttttgtcaagttggagagtcgtgctgaacggttttttatgagaagaatatgattttttctgcattatttgaaaacgaatgtttgaatttattttatttccaattattgttgccacagtcacagatgcctttgagtcgttaaccagccagttgtccctatccaagccatgaatttctttcctcacattcccatgttgtccactgtgttcagcagtatcggctgctatttactgccttttggcgtcgttttactgtggcttctgtatgaatcaagaaaagtaaaggccatcctccttgccgggctggtgattctgagcatggtgtgcatgttttttcatgaggcatgtgctcccagcagggaatatccgtgggactgcatggtggagcacatatttacaggaacgcttctcccgttcctctgtctgctgggatatattctgtacgtgtttctttgcgcctgcatcccggtgtacaggaaggtgtggaagggcatcggcttttttgcccttggagtaatgagcctggcttttgagtacgtgaatgtttcctttccggtgatgctgctggcgggttatttgttccgtttcttcctcttccggaagttccggaaccacatcccctttgtcaggaagtgccacggagtgcttgcgataggagtggtgcccggaatttgcctgatcagcgttgtcagcgccattttgtttcccccgccggagagttttatttgtgagaagatcaatgaggaaatggcgcgtgacatggccctgtggaattaccagagcaacctggttctgctgtccagccgttttctgaatgtggaacgcaagaaggactgcattaccgtaaagtattattgcgagacgaatatgggccctgccgtgtacaaggcattctgcaacaattacggcggttatgtaaaggcagagtgttccctgctgaacaggcatgctccctgatgacggaggacaacggcgtttttccgcgaggggccggtcagagttctatgtctccggtaaagacgaggtccgccggtccggtcagcgtcacgctggtaaagcggtctcccgtgcgctggaagcctactttgagcgtgtcccctcccgctacgtccacttgaatgggtgaaggggcatccgtcaatacggcgtgcagcagcgcgctggcggtcatgcccgttccgcaggcaagcgtttcatcctccacgccgcgttcataagtacgtatggcgatgtgccccggagacaggattctggcgaagttggcgttggtgccttttggagagaatgcgctatggtaacgcaggtaggcgcccagacggggaacgtccaggccgtccagcttgtccagaaacgctacggcgtgcggaacgcctgtattcaggaagtggacgtccgcccccaccgccgggtccgcattcagcacaaagagctgcagggagtggggatccgtcaggttcacggtgacattcccgtccttttcaaaggtggcggtcacgatgccggccatcgtttcaaaggggaggggagcggatttgtcgtgatgaagcagggccgcggcgaagttgccgaagcagcgggctccgttgccgcacatttccgcttctccgccgtcggcattgtaatagcgcatgcgcacggttccccctttgccccgggacggttccacggcaatcaggccgtccgccccgatgccgaagcggcggtcgcacagggcttcaatggtctccttgtccagcacggaggaaagttccaggtcacggttgtccaccatgacaaagtcatttccggcgcccgtcatcttgtagaaatgaagcagcataatagtaagttgtgttgtgccgggattttaatgcggccgtccggatttggcaaggcggcttacatgaatgacatggcgtccacgtcgatcacggcggtcaggtcgtcccccagcccggcttcctgcaccagcttccgcagggtgcgggagaggatgcgggcggacggccccttgaccgtgatctggaatctgaactggccgtgtgcgcggggaatgggcgccggcatggggtccgtcatcgtggctggagggggcagcatgccgcggaggcgcgccgcgagcgtgcgcgtggcgaattccgccatgttttcatgctgggagcgtatggtcagcacggcgatgtgggtgaaaggcggcaggtcgaaggagcggcgcatttccagctcctgcgccgcaaagccgtccgtatcgtgatggcgggcgtactgcagggaaggggactggggggtaaaggtctggatgatgacctccccggaaaggtcgccgcggccggcgcggcccgccacctgcgtcagaagctggaaggtgcgctctcccgcgcggggatccgggatatggagacccaggtccgcgttcagcacgcccaccagcgtcacgttgggaaagtccagacccttggcaatcatctgggtgcccaggagaatgtctatcttatgggcgcggaactggttcagaatggttctgacggcgtttttgcgccgggccacgtccgcatccacgcgcgtgatgcgcgccgcaggaaaggtgcgccgcaggatttcctccaccttctgggtaccgtacccctggagcatgatattggcggacctgcactccggacaggtgcggggcggcagggccttgaacccgcacaggtggcacatgaggcggtcctccgtacggtggtaggtcaggggcagggagcagtgcaggcacgtcaccacgtggccgcagtccggacactggatggagcgtgcgaatccgcgcctgttgagcagaaggatgacctgttcccccttgtccagccgccggtcgatggacattctgagccgctcggagatgacgttggggccggatttgtttctgccctccgtcttcatgtccagaatgcggatgagggggagctgctggccgtccgccctttccgtcagcttcaccagggaatattttccggtcagggcgttatggatgctttccagggaaggggtggcggagcccaggaccacggcgcagtcttccagatgggcgcgcagcacggccaggtcccgcccgtggtagcggggggagctttcctgcttgtaggacgcgtcatgctcctcatccacaatcaccagccccaggttctgaagaggggcgaagacggcggaacgggggccgatgacgatgcgtgcctttccggaacggatggcgtgccattcgtcaaagcgttctccgtccgataggaggctgtgcagcaccgccacggaagagggcagttccgcaaaacgggatttgaagcgctggacggtctggggcgtcagggagatttccggtaccatgatcagggcggattttccggatttcaccatttgggagacggcctgaaggtaaacctccgttttgccggagccggtgactccttgcaggagcaccggttttttgtgctccgccgtgcacatggccgtgatttcttccagcgccttctgctgctgatcgttcagcttcatgggctggctggggacgaactgctctccagtgctggggtcgcggtgcacggattcctccttcagggagatgaagcccttggccgccaggctgcgggcgatgttcagagcccccgtgccgaatgcggccagaggcgcttccatctgttccgcagatgaaaaataatccagcatttgggcctgccggggcgctttgcggtacagggcatccagctcctcacgggacggacgtttttccagatgcaccattttccgcattttttccgccgtgttttcctgacggacggtttccgggagcaggcagcggatcatttggtccagcgctacggaataatagtccgccgcccaggaggccagattcatcatgaccggggaaatcaagggttccgggtcgatcagtttcagaatgggcttgagcctgtccttccaggcagggtccggctcggacagcgtaagaacagtgccggtggccgtcctgttgcgcaggggaacctgcacgcggcagcccggcctgacgtcccccgcttccggcggaatgccgtagtccagcaccagatcgctttgtccgtcaaccagaatgcgcgccgcctgcatggagtgaaaggggggaaggaataattgttaatgataaccgaaggggaagcgggctacgccgctcatgtctttcagcacttcaatgtaattatagccgtagccgtccatgatctgcgtcacggctgccgcctggtcatgtccgatttccagggctacgaagccgttttcattcaggtagtcccgggcgcgggccagaaagcgttcaatgatttcccagccttccgggcctccgaacagggccgtatggggatctttcataacttccggggcaagctcctctccatccgcaatgtagggcaggttggccacgatgacgtcaaagcgcatttcccgtccggcatccttctcttcctcctcaggcacggaagcggaagaatccgctccttcctggcgcaggaccggtttttccagggggatgttttcaaacaggtccgtctggacggtggagaccctggctcccagccgcatggcgttttccagcgccaggtccagagcctgcggggaaatgtccgccagaacgacttccttcgcgcgctccttgagttccagagccagtgtgacgccgatgatgccggaaccggtacccatgtccagcacgcgtaccggacggtccgggattttctttaacaccatttccaccagttcttccgtttccgggcggggaatcagggcacgcgcgtccgtcaggaaatccctccggaaaaattccgtgaaccccagcaggtgctgcagcggttctcccgccgcccttcgtttcagcagctcgcggaggggagccagttccgcttcttcaacaggcctgtcaaaccgggagtaaagagccgtgcggttgcagtgcagaacatgggccatcaggtgctgcatggtggcgcgcgcctcgtcacagccctggcgcgccaggtagtccgtgccggactgaagaacttccagtagggttttcatgaaaggaaaagggggttaggacatgccggcttccgccaggcgttcctgcatttccgcatgctggagagccatgatcaggtcttccatctgccccatcaggatgccgtccagattgtgggacgtatagccgatgcggtggtccgtcaggcggttttgcgggaaattgtacgtccggattttttcttcacggccgccggagccaatgaggttgcggcgtgcggcggaatatttttccgcctcttcccgcttcttggcttcaaagagcttggcgcgcagaatcttcatgcctttttcacggttcttcatctggctgcgctcttcctcgcagcggacatagacgcccgtagggatgtgccagatctgcacggcggattccgtcttgttcacgtgctggccgcctgcgcctccggaacggcacacttcaatgcggaggtcctccgggcggatttctatgtccacttcctccgcttccggcatgacggccacggtggcggtagaggtgtggatgcgtccctgcgtttccgtggtgggcacgcgctgcacacggtgcacgcccccttcatacttcaggaagcggaacacttcttccccggcaatgcggcagacgacttccttgaagccgcccacgtctgacgggctgctttccagatgctcaaagcgccagccgcgttcttccgcaaaacgctggtacatccgcagcaggtctccggcaaacagggatgcttcatccccgcccgttccggcgcggatttcaataatggcgtcccggtcttccgtcgtgtcgcgggggagaaggctgtactggacgtcactgcgcaatttttccagcgccgcttccagttccgggatctccagggaggccagctccgccagttccggatcatccgtcttcgccagctcctggttgtcagccagctgctgttccgtggcgttcagggcatcccacgtgtccatcagttccttcaggcggcggtgctccctcatggtttcagaggcccgcttctggtcattgaaaaaatccggttcggcaatgaccgtttccaattcttccaggcgctggcggcgtttttcaatgagaggtgtgtaatccatggcgtttgcgtgtaaggaattctaaaagataacagggctttctgaaagccaaatccgggggatgtaagacatgttccggcatttgaaaaggagggggataccgcttcctgccgtcctgtccgcgctttcctgattccggaggaaccggaccaaaagaaaaccgcagccattacgtctttccaatatgccttccctggtaaggaggggcggaagcatcgtaactgctgcggcggtaaagctggcatcgcgtacgggactcgaacccgtgttgcccgcgtgaaaggcgggagtcctagaccgctagacgaacgcgacttttaggtttgcagggactgcgcggcgaagtaaatactaccggaggctgaaaggcaagaattatttgaatctgaatttaaaaaaatcgttatttgccttccggaatgtgggaatcgtcataatcgtccagcctgtgctgccagaggtagtaccgcgtttgctggacaagcactccggaaagggccagcagtgaaataagattgggaagggccatcaggccgttggcgcagtccgcaaacacccataccaggtctatcttggaaacgcagccggtaaagaccgccgccacccagatgacgcggtaaggcgtgatcagccggatgccccccaggtactccagggctttttccccaaagtaggaccagcccaggatggtggagactacaaaagtgaccaaactgaccgtcaggaggggggagcccacataaggaattttactgaatgccagcgtagtgagccgggggccgtcactggacgaaatatccgggtgggcgaggatgctggtagtcagcacaatgcccgtgagtgcgcagatgaccacggtatcccagaacggtccgctggaagagatgagcgcctgccgtacggggttgcggttctgtgcggcggcggaggcgatggcggcggagcccagcccggcttcattggaaaaaaggccgcgggccacgccggtccgcatggctgtcatgacggcggcgcccaccacgcccccggcagcggcttccccggtaaaggcgcagtccagaatgtaccggatggccggaagaatgtagtgggactgcacggccaggatgtagacacagcctataatgtaaattaccgccatgaacgggacgaagaaagcacataccttggcaatgctccggatgcctcccagcatcaccagggccgtcaggatggtcagcaccgcagccgttccccaggagggaatggcaaaggcgtggtggagctgttccgccgcggcattcccctgcgtcaggttgccgatgccgaaggcggcaatggccgtgaacacggcgaaggctacgccaagccatttgcatttcatgccgcgttccagcacaaacatggggccgccgctcatgttgccgtccttgttttccacccggtacttgatggcgagcagcccctcggaataccgtgtagccatgccaagaacgcccgtcagccagcaccagaaaatggcccccggccctccggcggcaatcgccacccccacgccgatgatgttgcccgcgccgatgttggcggccagggccaccatcagggaactgaacggggaaatgtcccccttgtccgtatggtccttcacaaagtacagtttcagggccttgagcaggtagcgctgcggaaagcgcagaatgacggtgaggtacaggtgagtgccaagcagcatgatgagcagtggccatccccacaggaaactgctgaaggcggacagccaggttgtgagcgcgtccccggtctggaaaaaggcgttttgcagggcttcaagcataccggaaagactctaaggaaaaatgctgtggtggcaagtccttaaaacacgggaagggcacggaaaaacaacttctgcggttccggcgcaggaaagccttttacaagggcgcgttggcttaatcttccatggagaacggccggggctggcccggaagccaacttccatgtgatcgatgtggaggagtgcctcaagcccctccggctctcctcatgctgtttaatgaagaatgaaggaagggatgatagttgcttgtctccggggtctgcggtctttatcataaggcctatgacgggagcggcagatgacgttgccccattgcctggcatgcggacgtcatgccgcgttccggccatcagcttgaaccaagagggaaaatgattgtttttacggaagaaaagaagtttaccagggaaaaagtgcaggagctgttcctgtccgttggatggatttccggccagtatctggcccggttgtacaaggccctgatgaattcgtccacggtatttaccgcgtgggatggcgaccggctggtcgggctggtgcggttgctggacgacggcgagctggtagcctacatgcactatgtcctggtgcatcccgactatcacggcaggggaattgcgggaaaaatgatggaaatggtcaaggagaagtacaaggactacctgtacattgaaatcatgccggaggagagcaggaacgccgccttttatgaaaagcatggcttccatgccatggaagacggcgtacccatgcagtggtgcaatttttcaaacaggacttaacgcccgcggctggacagtcaatttccggcaagcgcggaaggcggggcgttatttcgtgtggccgggatacagtaaacccgcgggtatcctttcggatcttggctccgcgggtttaccttctcatcccggattagctccggaaaaggttcagattcaattccttgataatggattgaagagctgcctggcccttcacggtgtttccggcggggtccaggggcggggagaaggccgccatggccatcttgccggggaccacggccactaggccgccacccacgccggacttggccggaacgcctgccttgtacatccagtcccctgtggaatcatagaggccggacatgcacatttccgcgaggatgggagaaacgttctcatccttcaccacccgctttttgctgacggggttgacgcccccgttggcatagcaggcgcccatcagcgccagctgggaggtggtgatgttcagagagcacatgcgggtgtacaggtccacgatcatgggcggcgtattgtaaaaatagccgtagctgtccaacagccacgcgatgccgcggttgtgctggttggtggcgctttccgacttgtaaatctcctggttcacggtcagggccgtattggcgaagttgttgaaattatggatcatgttcgcccatatttcatcggagtccgaaccgttgaccaggctgactgtcgccatggcccctgcgttgaccagggggttgaggggcttgccgccgtgcagctcaatcgccatcacggagttgaagggctccccggtggggtctgccccgatcttcgtgcgcagctccttcattccgatcagatccatgacgtaggccaggttgaaggccttggagatggattcaatggcaaagggcgtgtccgcggagcctgcggtcaggatatctccgttgacagtgactacggcaatcgccagcaagtctgaggggacttgcgccagagcggggatgtaggaggcgtttttgcctccctggaccgttttggcgtaggcgtacgcgttgtccacagccgtctggatttgttcattggaagggacgttactcatgggatatggtatggattggggttactgtagaatgggttccattggttttttcccatccgaagggttcgaaggcgtcttcaggatccacaggccgcttccaggagggcttggccatggcatggatgatgaaaggaatgccggcgaagatgaaggtgcctatcaccagaagcataatgtacatcgtattgctgccgacggtaatttggttcggcggaatgaagctcaccaggaaggccgccaggctggccaggaagccgaggccgcctacaatccacatgccgagggtcttgcctccgggaatgcggaaagtgcggggcgtattcggttcccggtagcgcagataaatgccggaggcgaacatcagcatgtacatgatgaggtacaggatgatggtaagctgggaaataatctggtaggcggactgcacggaaggcatgatcacgaacatgatggaaagcagggtgacgatgcagccctgaatgagcaggatgcccatctggacgttgttcttgttccgcttctgcatgacgggcggcaggttgccagccaagcctacctggtacaagcctttggaaggacctcccacccacgctgttacctgggccagaacgcctacggccagcgcaagcgccagaatccagttcatccagccgaggccgaagaagctgaagtaactgtcataagaaatcagcaggctctgcaccaggttaatctgggagttcggaatgatgaagccgatggccagcgtgcccagaacgaaaatgagtaccgtaatgatggcggaaatcagaatggccagcggatagttgcggccggggtcattcacgtccttcacatgcacggcggacatttccatccctgcgtagaacaggaagatgctggcggccagaacgaggttgttgaaattgctcatgtccggtatcagcttgtcccagctcatgtccagcagaatcgggttgcctccggcccaatagctcaggcccagcagaatcaggatggcgcccggaatgatggttccgatgatggtgccccatttggtgacgcctgcggaagtcttcatgccacgcaggttgagcagggtagctgcccagtacacacacagcaccacgatgagcacataccacttgttggcggcaagagcttcatcccatcgctgtccgggccccatgaaagccagggagacggcggcgaaggtcagtacggtcgggaaccagatggtgctttcaatccattgcagccagatggccaggaacccccattttttcccgaaggcttcgcctacccaacggtaaacgccgcctttctgcggccatccggtggtgagttccgcggctaccagggagacgggcaccaggaaaaagaccgctgcaaaaatatagtaaaaaacggaactgagtccgtacgtgctttccgcaggcatgccgcgcaagctgacaatggcggaaacgttaatcatggcgagcgtaaatacccccatgcgaaggacggattttaccgccggagcgttattggttgtagcgggacctgttggagaggtccctgattgagtcgtattattcattggtttattccgggttgagaattgggacagcgtatagaagtgccgacaccgaccttatctgaacgaccagaaaaagagctctttcgttgaagagatggtgcagataggggtgccggagtctgtcttaacggcggttaccgctttccggatggagaaggaaaggccgcccgctttcatgctggcgcttttttgagcggcaaagcaggagcatacgggtagaacgtccggaatggctctccggctgcgggggattatctgccaggaatgaaaatgaacgctactaatgccacttaaggggattccattgtttcaacccagttttctgtttcccgggggacggctccgtgtagaaaaacgggtaagaacggaaaatggattggtatggtccaatttttcccttctggcggaattccggaggggggcttcggcttgtaatgatcatcgcccttttgacggggttccactcgtaggaataaaccttgacgggagctccctgcgggacggcttctccgcgaacattcctggaagcctgggagactccgtattgggagatggtgaggttgttggaggaacggctgaaactcagcatgccgtccctggaactggtgatgctgttgatgttcccctggctgtttttggaaatctggacctgggaatcgtaggactgtttcgaaataatggccccggttttggtggtcatggaatggacgctgccggtggagagattcaacgtctgggaagaaccgtccggctggacaactttagcgaatgcggcgttgccagtggtgcaaatatcatcgcagggatcagaacaggattggcagggattgctttccttggtcggtggaacgctgctggagctggaagactcggagggacgcgcagttccgcgtggaggcccgttccgaatacgtggacgtgcgcgaacagatcaccgtgaaagctgccctgggtgccacgcgcctggacaacaagaccgtcttcctgatgccctgcaaagaggcataggtataaatgtgcggtagcataacgtgtccggatgtttgcctgtaaagtaaagatcatcaattattcagacaatacaaaaaatccattattttacaaaaaatccgacgttgtgctatcacacctcatgaatggccgagggagataacccactgcacttttttttctgtatatttctcccggaaaggtccctggcagccgccagtcttccgggcattttccagggcggttgcaccttcatatcaacatcaacaaattaaattaaaatcatgaatactcctgttactttacttgaagcgggatttcccctggacaaatgggaaggccaactgaaaggcgaccagccccatttgaatgtggaagctcccgctcccgaaaagacgaccctttgggacggctacatcaaaattgaaaccgcaggctcttatgaaatcaaaatcggcgcggacgattatggttattttacgctgggaggccagacagccagcattgccgattcgggacaataccgggaatccgatcctgtcaccgtggaactggaagcgggatggcaccaggccttcctttcccacaccaacatcgactacaagccggaatccggcaacgtctcgcgtttcgactcctacctcaacggagtccaggtggagctctacgacatcgtacccgcagaaaacaagccggtggtatgcaagaagggatgtgacggcaaggaagtttgtgaggacccggacacccccagcgggggaaccacccccagttcctccccatcctccgcccgcatgtcctcccggctggcccgttctacggtgtccggctcctccgcaggaacgaacgtggcggcggatgcctcccaggaaagcatgtattggcagtgcaacttcggcctgttccggggattgcccggcgtacccggaggccagattgaaatcgtggaggaggaatttacagaacgcctctggtccccctccgccctgttgttccgccatgtgctgcacagcaaattgctcaaacccacggaaggcttgagcaacaactgcatggtagctgttcagaaaggttccctgctggtttattacttcatcacccagggggaagaggacaacggaagtgtgggcaacatcggctacaacacgcgcctgaccaaccgcgcccggatgctgggagaagattttacaccagtcgtttccaatccggtttacattgaagtggcggaagccaatggctgcaagatggtctattccgtggaaacgggagatcccgtgcgttttacggcatccagcggccagcagctcacggaagcggattttcatgccttcatggatgtggtgtatgcggaagatggttccctgcggcaggtgagcaatatttcagacggccttgccagcgtgcaggacgtgacggaagcgggctatacgctggccctgtaccttccttcccaggtaggagccaaggatgagacgacagggctttatgccgtgacgggggaaccgttcaagcactttgtttttgcccgcaatgaggaaggggacaaggcgagcgtgacggaaagaacgcccggaaggaatgattttgtcacaacctggtggaagaatggagaggtatggtgtctgggcaagggcacgggagactccgctattcatacggtcaggacgcgcacggaggtctccgaaaaggaatggaacctgctgacagaagtgcggatgggggaagaaggaatggcggtttccagcctgatggagaactacaaatccaccccgcagggcaatctgctgatgagcagaacggaaggttacggttccgacatggcccgcacgacttcttatgaatattccgccaacggggttctgacgaaagaaacgcgtccggacggttccgaagtcaagtacgaacaggatcgtctgggtcgtcagactctcgtttccactccgtataaaggctttgcggaaaagagagtgaagacgacctactgcgaagcgaagttcaacgatcacgatcccgcagaagtgaccaccatacttcggcaaaagaacaaggcggacgtgcagttgaaccagacgctttatacctatacggaagaaaacgacgtcaggcgcgtggaagaaaggacgaccgcgcttggggctgaaggaacgcggctggaagtgacggaaacatggctggcctccgcgcccaatccgtatgccaggggacgcctcaagatgcgccagggtattgacggcgtacagagggtttattcttacgaacttacaatctggcatggagcggcctataccgtgacggaggaaacgcaaatcgacggagcgcccgtaccggggcagagccgccgaatggtgtccttcatctcggcggaaggcaacacggtcaggacggaggaatacatcctgctgacggatggaacctggtcgctgctggacagcgccggctacgagttcgaccttcagaaccgctggatcaggaagacgcgcggcaacggacgaataacggaacgggaactgatgtgcgacgggcgtcccctatgggaaaaagacgaagacggcatcctgaccagctatggctatgacagcgcaaggcggttggtggaaatgatccgctctgcgacggagactacccctgaaaccatcatctcctatacgagggatgccctggggcgtgtagttgaggagagaaaggacattggagccatgagcactgtgcgccggacggcttatgacgtgctgggacgcgtcagctccgagacggatgaactgggaagggttacgacctatgcctatagcgacgacggattaacgacgacggcgacgcttccccatggagcaaccctgattcggacgactgcccctgacggtactcttctctaccagggagggacgggacagaaggaactgtcctacaggattgacatcattgaggatggcatccggaaagtcacattggaacctcagccagaaggagacccggtagcaacgttccgggaaatcaccaacggttatgggttagtcatccgcacggctacagccaacgccttgggcagtttctattacagccggttcacgtatgatgaacgggggtatcttgtcaagacggaggtggatgcgggaacgcctgctaccgccatggctccaaccttgaaggaatacgacgccttcggcaatgtaacgaaggaaacatggaagctggacgatcatcccgatgccaccaattcccgcatcacgatttattcctatgcggctgaacagggggatgacggcatctaccagatcacgaccacgactatgaacaacagccagggaacaacctattcccttacggaaaaggttttgatttcctccctgtccgcaactttggaagacaaaacggtttctattgacccgagagggcaggaatctgcttcctggacggagtatgccggagatgccaagcgaatcagcaagaacaaaatcccgggttgtgaaactgcggcaatctccctgatcgtggatggcctggctgtgtcccgcactgattatgccggagtaacgacaagtattgcccgcagctacacggaaacaggcattgttctcgcctccacggatgtccgcggcaatgtgacaacaactgtccaggacatcgccgggaggacagtcagcgtaacggatgctgcggggaatgccactacttacgcttatggggaaccgatcgactctcctacggtcatcacggacgctttggggtatacttcctactacgcctatgatatgagagaaaggaagatcgtggaatggggaacgggcatccagcctgccgtctttgcctacgacaacgccgaccatctgatcagcatgcgaacgttccgggtgagcggggaaaccattacaaccgacccgcgggaacggactgatggcgacacgactacctggacttacgagaaggccagcggtcttttgctgtgcaagacctatgcggatgagactcatgagaatatatcttataacgttttcaatatgattacttcaaagatagatgcaagaaatgtgactgtttcttttatttatgatctcaaaaaaggagtaaatacttctattattgccgatgatggaactccaagaattacctatgcttataaccacttggcgcagatgacccgtgtgacggacgatgccggtaccagggactttacctacaaccagtacaatgaactggtgacggaaacgacgacgggactggctcaaagcgctttgactcaccaacgcgacagccagggcagggatgcgggctacagcctgcaatacggcaattccaccgtccagcagacggcgctgggttacgatactgccggaaggctctcaaccgtggaactcaacggaatggcaactccttttgcctatggctacaatgccaataacggcctgctggagacgctgaattatcccaatacgctgaagagatggtacacacgggaagaaaagcgggacctggttattaaagtggattatctgcgtccgggaggtcagaattatccggccaaggttgattacacctatgactccctggggcgtcccgtgacgaaaaaggattatttcaacacacccggtcccgatttgacacatgcctacacgtataatgaccgtggcgagctgactgccgatgccatgagccggggaggaacctacagctacgcctatgacaatatcggcaaccgggaaatgtcccgggaaggcacggctgttcccactgcctatgaaaccaatgaactcaaccagtatatttccattggggagggagagcaggctgtgttcgttccggaacatgacgctgccgggaaccagacgaaaatcaggaccgccacgggagaatggaccgttgcctacaatgccttgaaccaggcggcgagtttcacgcaaggcggcaagcgcgtggaatgccgttacgactacatgggaaggcgagtggagaaatccgtttatgagggagaagatcttgtttcccgcaagcgcttcctgtaccggaattacctgcaaatcgcggaactggatgcccacgatacaacggaagagtcaacacctgttctgcgcaagacctacctgtgggacccgatggaatcttcagcgacacgcatttttgccatgaggctgtttgatgaaaagggaatctatcaggaagacttgtattacacgcatgacttcatgaaaaacacgatagccctgtttggcatccaggcaggaagaagagccttgtatgaatacgggccttatggtagtgtggtcaagatggaaggtaatgcagccgagctgaatccgttccgcttttcaagcgagtattccgatgacgaattgggattggtctattataattacagatattatcatgccctctccgggcggtggctgacgaaagaccccatggaagaatatagtacgttgaatatgtacagatttctcaataacaatttgggaattgatcaacttggattaatcagcgtatctcaacaacagccgttccccagtgggcttcctcgcgtggaaggacctcctgaattgagttataaaaacatttcaaagaaggcaggcaagtgtgggcacttccgttgggatattcaatggattcttaagggaaaatcgagcccggatggagtaatatatcaggaagtcgaagccgaggtagagatgaagttttgcggggcagatcttgagccacaaaaaggaaaggaaaaacaaaaggaaagctggaacattggtggggggatgaaagatacatggtcatatcctaaaatgttttcttacgaggaacatcctacggaaggggaagttacttttaagggaacggcttactatacatcggaaaaacctggtatggcaaaacctcctacatggaagtatctaggagacgaggtggaacctctgtgtaaaggaggagtttgccttgccgatacatcccacaatggacttggaaaaaatccgacagcggattctaacaaagtgacaagaaccttgaaaatatcatggtgctgttgtgaatccaataaagataccaaatttgaatcatgagaatgttaccctctgcatgctgtattggagctctatatgctttgatttcctgtacccacaaaaatatcactcaagacgatattggtcatattgaaatcattcataatcaaatttatacagaattaaaggatgtttctttgcctggttataaatattattcctggccggattatccctccgacagtattcgggagatcagggagagggcgaaacgcctgaaacgaggaatggatgaacaacaggtggttgccctgatgcgtcctttagttgtaaatccgcctttgattccaggaaagtacagggatccggaggttgtaagaaaggagtttcattttaatgcctcttacaaagatttggtgaaaattaatgagtcattctatgatccaaaacgttctgatagattctccatcttaatgaaaattcctttttctaagaaaacagggaaactccggaaagatggacaggaacttgatttggaagtaatggtttttcccaattgggatgtctattatttgcccatttctgaaaaacgtcccatatatcaataaccaatatatataataaaagaaatgaagagccccgaaatatttcggggctcttttttgctcaatggcattttacctgttttcttatcatgtgacttttgatgccgaaaaatggcttgaaatgaaaaacgtgaagtagccttatgatagtgtaatcaggatggaaggtaatgcagccgagctgagtccgttccgtttctcaagcgagtatgctgatgacgatgtaggattggtctgttataattaccattatttcaatcctatggatggcagatggatcagtagatatcctattcaagagtctgatagctgaaatttgtatgaatttactaggaataatagtatttacatttctgattttttaggactgctgtttttgttctttctaccttcgatccgaatgatcctcaactaaatgggtcccaagttaaaatagccgataaagatataaaagctatagatgattttttagcggattttgatgcagtagatgaagatatgcggtaaaacttaagtaaaacactggtaaagagtggttggtcagtagatcagtaaaaaactcccaattcctgccttgatgaggttctccctttaggcaggaatttttgtgatctgatattatcaggagaccaagtttttatggatgattttccaaaagcgcataaagccctcatgaagaatccatattttattgtaaagggctcccggatgttccgggagcctttttgtttttccattttcctgatggatttttcgggaaagaagaagtaggttgggaattgtttccctgcctctccatgaatattcctcttcattgcctgctgctccagactccgggagaactcctggaagggaaaaagacttcctccggctggggtatgccgtggaagcctttccgtccacacaggacgcctcctgcctggatgatgcggaaccggaagaacttccgctgcatgcctatgcccccggctggcgccatggcgacctgcctgtggttcgttcccgccgtgcttctctggtccggatgcttgccgatccccgctggcagaaggaggatcatgcccgacaatgaaccggcacaagtccgcaggaacattcgccagacgcagaacagtaactgccgttgcgcgcagactgtggaaactcagaggggcaagtctccgcctgtttcctttcgctgctggaggattcttttcaatgtatccgaatttcttcagcagagcgttgaattcgatggaaagtttgctcgacgtatgatccgcctgcgcgtgacgcattgccgctaccggaaatacgtaatcgctcgcacagttggcaagccgtctgtccagaacttccttcaaaggcaagatgatgggcttgttcatgtgtctcttggttttttgggccgtcatcgaaatgcttccaccttccatgtcaatttgcttccattggagggtagcgatgtcgtccaaacgctggcctcctgtataaaggcagacgcgtatcatgtcgggccattcccccggcaggatttcggtcaatcgttgagcttcctcgactgtaaaagcgcgcctttcggtagcatcggcacggttgatcttgctgggacgcacccccttgaaaggattgtacggaaagagccgttcgttgactgcctgttgaaaggccgcattcaaaccgtataggtaaatgcttaccgtcttggaactcagcaattccaaatatttttccatgaacctttgcgcctgggcctccgtcaccgtgtccaggggcatttcctgtttgggtcccagaaagtcgagaaaacaccggatagccttcccgtaacgaagtggtgttagcggttttgaatctgctatgcaccggaaagtcgatgtatagcatagtgcataacaaaaccatgtaataggactgaatatcacacaatctgctaccaagggaggccttgtaaaatgaggggtttgcaataaccccgaaggcaaaaaatggagcggatgatgggattcgaacccacgacatcaaccttggcaaggttgcgctctacccctgagctacatccgctttggatgaccggagccttacggcatccgtgtggcagaaaatatatagggttatccggatttggcaagatttttttagagaaaaattcatgttcaccggaatagggccatgctgccgtaccttttaaagaggactgatggttctgtggaaggagcggggaggacgggaaggtgccaggctgctttttccggttgttcccgtttgacttcggggaaggcggcgttttgttgctctttcagttccgcggccgttttggctccatgttccagcaacagtttttccttggcggcgtcatggcggttcctggcgtggtccagcatggaaatcgttcccctatgtacggcattgacgttggctccctgttccagataaaattaacctgctccgtattgccgcggcagatggtattcttgagcgccgtatcttcgttaaccgatcgtttgcagtgtggttccgtaggtttcagcagttgctgggcctggggcatgcggatgacggtaaaggcgtacggggtgaattcatccggctccggggccaggcggttttccgccacggcgcggacgagtcgcttgacgttttccgccagcaggccttccgagtccaggctggtttgcgctttcaaccgggcgaaggccagcaggttgtcccttctgtcccgccatcaggagacgcaatcctccagaggatgactgtggtcggcatctcggggtggtcttaaccggaagagcatgtatttatcccttataacggcggaatggcgtcggtgtccgaaatgaagcggtttttgcggaaagaatgtgtaaaatcttgaagaactccctgtttccataaaaaacggggctgttccggaaggcgcgttttccgtgccctggaacagtcccgtgaagaaaagggagtcaatggaggagattagtagcttctggcccagaggacgcggcgttccgtcatgcggccggtgaggatgcagggagcgggttccccgcggcccagttcgccgagcgggatgcagcgtatggagatgcgcaggcgcttggcgagttcctcttcctcttccggggatccgtcccacggcacctggagccagtcggcgtcgccttctccggtaaagttttcttccagttcccggagggtggaggcggggcggatgtgggcgtcccggaaggcgatggcccgttgaagcagggtgtcctggatgttctggagaatgtccgtgacggtatcaaccagttccgtttccgggacgaaggatttttcattgacgggcaggtcgcgccgctggaggcagacggagcctttttccaggtcccgggggccgatttccaggcgcacgggcactcccttcttcacccattcccatttcttggcgccgccgcccaggtcgcgcctgtccaccagcacgcggagcggctggccgtggaaattcttggcgcggagggtgttcgccagttcctcgcagtggtccagaatggcctggcggctttcttccttgggcgtgacggggatgatgacgacctgctggggggcgacgcggggcgggcataccaggccgtcgtcgtcggagtgcatcatgatgagcgccccgatcatgcgggtggaaacgccccaggagctcgtccaggcgaactgctgggtattgtccctcccggcaaagcagatgttctgggatttggagaagttctgccccaggaagtgggaggttccggcctggatggccttgcggtcctgcaccatagcttccaccgtgtaggtctgttccgcgccggggaagcgttccgcctccgtcttttctccggggatggtgggaatggccagaacgtccctctggaagtcctcgtaaaccttgtgcatggtgagggtttcctcaatggcctcctcccgggtttcatgggccgtgtggccttcctgccacaggaattcggccgtgcgcaggaagatgcggggcctcatttcccagcgcatcacgttgcaccactggttcaccttgaggggcaggtcgcggtagctggaggtccagcgggcgaaggccgcgccgatgacggtttccgaggtggggcggatgacgaagggctccgtgagctccccggtgggaatcatgcgggtctttccggtggcttcatctttctgcgcttccagcctgtggtgcgtgaccacggcgcattccgtggcgaagccttcggcgtgctccgcttccttctccagataggaaatcggaatcaggagggggaagtaggcgttcgtgtggccggtgtccttgaagcgctggtccaggtctttctggatgagttcccagatggcgtagccccacggcttgatgaccatgcagccgcgcacctcggaattctccgccatgtcggcggccttgatgacttgctggtaccactcggggaagtcctgggcgcgggtgggggtgattgcagtttgttgagacatattggatggtatgttgaatggagcgggcgcggcccgcaaaggaagctcggaatattaaaagggggcgtttctgtattcccggtaattgctgtaggcgaagagggccatgaatatgggaatgaagtagccgtggaagagctggaagctgagcagcccgatgaggatggacgtgatgaacccggtcatgaacactttcctgggggagcggatgaactgggcgatcagctggccgccgtccagggggtagatgggcagcaggttcaggatcgtccaccattccccgatcatgatgaggcaggagaggatgtaaagctggggggagatggccgccgccgtgaaggggctgatggccaggtcccagaaggtcaggttgtgcgcggtcatgaccggagcgacgatgttccaggtaatccacaggctgatgatgcccagcagcagggtcatcatggggcccgccagaatcatgagggccctccctccgcgcgtcaattgcatgccgtggctgctcgtcaggccgccgaagagttccaggacgatcgtctgctggccgccgcccagcctgcggcccaccagcgcgtgccccatttcatgggacaggatggcgacgaagccggcaatgacgaacagggccggataaatgaggccttccacactgttgatgctgagagcgccgccgaagatggccagcaccacccagaagctggggcggatgtaaacaggtatcccgaacagggtgaaatgaatcatgcgcgagagggtaagggcagattccccttttgccaagcccggagaatgtgcatgcaccgttttggcgttggtacggtgcaggggattgtgttaaaaggccttcatgaggctgtttcccatcatcctgtgctgtgccgttcaggccgtacgggggtatgacggaccccctcccctgacggaggtggacggccgttcccccatccgcatggggggggaattgctgggcggctaccgttcggactacatccaccgcggggagaagctgggccccaattccgtggaaggccagatttccggcggggcctccctgtcggactcatgggcggtcagcggggaactcttcgccatccgcaactggcaggggcgcaatttcagccagaccaccctgcacggggagcttcaatattatctggcggacgagtgcacggccggactgtttgtcaacgggcagtggtatgattcctgccccctgaaaaccggggtggagcccggcctgtccctcaagtggaaccccatgccgtcctggtcgttcagcggctcctttctgtatgattccgggcaggagggggtgtactcccagtggggcgttacctggcagcccctgctgtgtgaatccgtcgccatggtgaatacggtttccctgggtttttcccatgattacctggggagaaacggcttgaaggaactgatggtgcgcacgggcgcgcggtgggccgtttccggcagtctgcggttggagcctttcctgggatggtattgcggctacgggcgtgacgatttcaaaaaagtggtgctgggcctttggtgctcttacgttttttaacgggcggatttctccggttttccggcattttccagttgccaaacggggaggcttggtcataatggcccgcgtattatgaagcctacacttcttgttttagcagctggtatgggtagccgttacggcggtctcaagcaacttgacccgatgggtcccaatggtgaagtcgttctcgactattctgtttatgatgccatccgggccggtttcggaaaagtggtattcattatccgccgtgactttgaagatattttcaaggaaaaggtcggcagccgctttgccggcaagattgaggtggattacgccttccagtccctggacgacctgcctgaaggcttttccgtgccggaaggccgtgaaaagccctggggcaccgcccatgccctgcgcgccgcccgccacgtggtgaaggaaccctttgccgtggtgaacgcggatgacttttacggcgcggacgcctttgtgcaggccgccaagttcctgacttccaccacggatgaacccggaaaggcccattacggcatgatcggctatccgttgaagaacaccctctccgacaacggggacgtgaatcgcggcatctgctccatcaaggaaggcctgctggacggggtggaggaattcgtgaaaatccaggctgatgaagacggcgtggtgcgcggcaacaacctgaagggcgaacgcctgcccgtggaccccggcgaactggtttccatgaatttctggctcttctcctcctccttcattgagctgacggaagaccgtttcattgacttcctgaaggaacacggccaggagcccaagagcgaatgctttattcccaccgtggtggacgccctgattcatgaagaccgcgcggactgcgccgttcttcccacctcctccacttggttcggcatgacctatcccggggacaagcccatggtcgtggaaggcatcaacaaactcatcaagcagggcgtataccctgaaaagctcaactaagcctcttttcccatgcacgatctcaaggctgtatcatccctgttcgatctccggggcgacttcgtccacggttactcctacggcagcggccacatcaacgacacctactgcatctgggtggaccaggcgggccagcgcatccgctacatcctccagcgcgtgaaccataacgtgttcaagcagcccatccccctgatggaaaacgtgaagcgcgtgacggaccacgccctgaagcgcctgaaggaggaggactgcccggaagcctaccgccgcaccctcacgctggttccctccgtggacggcaagccgtacgccctggatgcggacggcaactgctggcgcgtgtacccgttcattgaacgcgcacgcacctatgaccagattgaaactaccaggcagtgccaggaagcggcgcgcgccttcggcgagttccagaaactcacggcggacctgcccggagaacccctgtttgaaaccatccccgatttccacaataccacttcccgcctggaggccctgaaaaaggccatccagtccgaccccctgggccgcgtgaaggaagtgcagaaggaaatagactggtacctggcccgtgaagcggactgccatctggtggtggactacctgaaatccggcgaactgcccctgcgctgcacgcacaacgacaccaagctgaacaacgtgatgctggacgacgtgaccggggaaggcatctgcgtgattgacctggacactacgatgcccggttccgccatctacgacttcggggatatgatccgcacggccacgtcccccgccgcggaagatgaaaaggacatctccaaggtcacgatgcgcatgttcatgtttgaggcgctggtgcagggttacctgagctccgccaagagcttcctgacgcttctggaaaagagcctgctgccgttctccggcaagctgctcacgatggaatgcggcatccgcttcctgacggactacctgtccggagacgtgtacttcaagatccaccgcccggaacacaacctggaccgctgccgcacgcagatggccctggtggaatccatcgaggcgcagatggatgaaatgaaggccgttgtggaccgctactaaccaatacctaccaacatcggaaaaacacatgaagattctcgtaaccggcggcgccggattcatcggttcccacattgtggaacactatcaggacaaggcggaggaaatccgcgtgctggacaacctgcgcacgggctacctcaagaacctggacgggctcaagcacaccttcattgaaggctccatctgcgaccgcgaactggtgcgccaggcggtgcagggcgtggactacatcttccacatggccgcgctcgtctccgtgccggaatccatgagcaagatcggagaatgcattgacatcaacgtcaacggccttctgaacgtgctggaggaagcctccgccgccggggtcaagaaaatcgtgctggcgtcttccgccgccatctatggtgacaaccccaccgtgcccaagctggaaaccatgtacccggaacccaagagcccctatgccatcaccaagctggatggggaatactacctcaacatgttccgggcggaaggcaaggtcaacacggccgccgtgcgcttcttcaatgtcttcggcccccggcaggaccccaagggggcctatgccgccgcggtgcccattttcattgaaaaagccgtcaagggagaagacatcaccgtgtacggcgacggcacccagacgcgcgacttcatttacgtgaaggacatcgtgggggccctcaccttcgtggcggagcatccggaagtcaccggcgtgttcaatgccgggtacggcggccagatcaccattgaagaactggcggacaacatcatcaaggccgcgggttcctcctccaaggtgctccatgccccggaacgcgccggcgacgtgaagcattcccgcgcctgtgcggacaagctccggagcgccggatggcagcccaaacacaccctgccggaaggcctggcgactacgctggaatatttcaagggcatcctgggcaagtaactttccggaacctccgggttcatcatcattcagggactgtctccgctcctgcggcggagacagtcttttttcatgccggaatggctcatgtatgacaaattccgccgatgctatcatctgaatcattcaaaaagacattttgccataatgggaatggcagaagcgcagcattccgataggaatgaaaattcattcatcatcaagcaggtttcccggaatgaggcaatactttgcagctacaataagatgattggcggaagttgatatttcgtatttgttagagaaaaaaatttcttacaggaagggcggtcgccgggattgaatatcattgacaggaggaagggttaataatagagaccaaaaacgatatgcatcccttcagaagtacttctgccaatcatctagctgcgtttaatgatccctatcttgaactggtcatggcccgccggaaggaggaagcccgctggggatggataccttttgccgcattcgtctcctttttattcgtgtaccgtatcttcggcttgttcatgccgagcaatgatgcggacggctcggaaccctggcttttcgtgctggcgctggcaggctgggggcttctggcgctcatccacatgattgtgcttcccatctggatgctgatcgcctccctccgttactgggaggtgaaccgcaggatgctggcggtgacggggcttctgttcagtgttcttgcccctgtctgcatggttctgatgctgtcctgctggtccgtgtccggttgaagcggggcttgaccgttccactggccgccgcggggaaggggcattctgcggcgtgagtccggttgccgcgggctcccctggctgatggccgtttggcggggcgggtaatttcttctcccctctttttcctcctctttctgcggggaggggacggcgttccctccgtgaaacttgccggattccggggattggccttttctccggccttcccagtaggtaaaatgccttcaatggatctgttcagtttacaggaagcggacgcgagagaaggcttcgagcctggagcggatatgtccgccatgcccctggccgcgcgcatgcgtccgcgcaccctggatgaagtggcgggacagaggcacctgctggcgccgggaaagctgctcaggcgcgcgattgaaacggacaggttcacctccctgattttttacggtcctcccggctgcgggaagaccaccctggccgccgtcatcgcccggacgacgaacgcccatttcatgatgctcaacggtgtggaatccaacgtggcggacatccgggagaaaatcgcccaggcgcagatgaggatgagcatgcacgggcggaaaaccgtcctcttcgtggatgagctgcaccggttcaacaaggcgcagcaggacgtcctgctcccccatctggaaaagggaacggtcaggttcatcggcgcgacgacggagaacccctactttgcgatcaactcccccctgctgtcccgctcccaggttttcccgctggaacccgtgccggaggaagagctggccgccctgctgaagcgtgccctggcggacgcggagcgcgggctgggagcctcccgcgtggacatggaggaggaagccctgaaccacctggccgccaaggcggacggagacgcccggaaggccatcacggcgctggaagtggccgttctgtccactccggagggggaagacggcgttatccatgtgaacctctccgtggcggaggaatccatccagcgcaaggccatcaagtatgaccgcctgggagattcccattacgacacgatttccgccttcatcaaatccatgcgcggctctgatcctgacgccgccctgtactggctggggatgatgctggaagccggggaggacatccgcttcatcgggagaaggctggtcatcgccgcgtcggaagacgtggggctggcggattccaacgctctgcgcgtggcgctggacgcggcgcgcgcggcggaaatgatcggcatgccggaggcccgcatcccgctggcgcacgccaccgtgtacctggctacggcccccaagagcaattccgcctacatgggcatcaatgccgccatggatgacgtgcgcaacggaaaaacgctggccgtgccggagcacctccggacgcccacgcgcaagaagctggccgccgccggcggtgcggacgccgccaggctggaatacctgtattcccatgattatccggaacattacgtcccccaggcctacctgccggaaggccgcgtttactacacccccaccggaaacgggctggaactgcgcatcaaggagcgcatggaataccgccgcaagctggcggaggaaggcgggaaaaagggctgaacagggcgcttcccttgtccaagctgacggcgccagcatgccggcagatgcacgggccgcctctcaattcgttttgatttttccgggaatgcggctccattcgtcgacaaagaaggaaggaaacgcttgcgccagctcctgcatgggagcgggcaatcactttttccgggaaaaaggggaaggcaggaattcccgcgggaacatcctgcctttttgaaggttttgatagggagaaggcttgtgcgcctccgctttccggaaggaatcagggttccttggttacgatgatgtcgcagtccgcgtcaaaccagccctggccctggcagtcgaagaccaggtccggtttttcggaaccggagaggcgcagggtgaattcgcgcccgtttttgtcttgctggtccttgggcagttcgctgaccacgcggctgcccctcatgaagcggggattgcggatgttgcagccgccgctgttcatcttgaaggtgatcttgtagttgccggggccgttgagcatgctgccgatgttgacgcgggtgggcgtaaattccgggcgcaggtcatagcccgtaaagcgcggctccttgagggtgacgggttccgtcaggaagcggtagtagttctgcgcgcctgttcccatcagggtcttgggggagattttggcgatgtccgccagggttttcaacgcctggtcctttttcccctcgctgcggtagagccagaacctggccgccatgacctgctgtttctgcaggggagtcaggccggggattttgagctgcttgtccacataggcatgggcggccttgtagtccttctggccgccgtttttgccggagtcttccaccatccgctgcaccttttcaatatagggcaggtgcttgaaggtgtatttgaagtgcatgcccctggtgtcttccgggtccgccttcttgattttttccagaatgtccttcctggcggaggccgcgtacgggggaagctgctggaggccttccccgtagagaagggccgcgttcgcgccggaagaggcgtccgccttttcccacagggcattggccttttcctgctgcttcacggcttccagcgcctgcttcatgacggcgggcagcgtttccttggaaacgccttcggacaggaagaccatgccgccggcgggggaaaccacctggatggccgggatattccagatttcaccgggaggcttgggcagcttcttttcctcttccgtcatttcctcccgttcgtcctggatgcaccagaggacgggttccggggagtccttggccaggtgctccacggcgcgggtgacttcgcgtgacttgggggaccagtccgttccggcccacacgacgatcatgtatttgttgacggttttggcctcgtccttcacggcgctgtaggccggaagggccgcctggacgggcgcggacaggaggagggctgcggccagcaggccgggaacgatgttgagatgatgaaacatggcgttaatggaaaagggtgcaggggttatttttcgtaaacgaggatgtggcgcaggtgcatgaattccggctgggcgttcttggcttccaccttgatccacttggccttggttccttccggagcggtgatgacccattccttgggcatgttttccgtggcggccagggggaaccaggtggctccgtccgtggaggtggagacctccatcttcttcatgcggtcttcattgccgttgcgcttggtgactaccagcccggccaggtctacgccgtttttcagttccacaatgacgttggggttcgcttccttgtccgtatgctgggagccgccgcaggggcgcagcaggttgatgtggtcccacgggctgtcccactggcaggtggtggagcaccggaccatgccgtccgcgggcaccagcttccagccctgggggatggctgcattgaccgtgttggcagacgtatcggcgtcagagaaggaggcggccgctttgctcagggtctggaaggccgggatggagcgggccatttccgtggcgtagatggctttgccgtaggcttccttcagcttcttgggatcgggggcttttccggaggctccggcttcccccgtctgctgggctaccttggcgaaggcgttggagaagacgtccgcctgtccgttttccacaaaggttttaacggcccattccagcgcctggccgaagttggtgccgtctcccgttttcaggtgcgtggagaggaccgtttccagataggccgccttttcctgcggattggtcaggaaggcggactgggaatccagcacgggctggaatttcaccgcccaggaggtgggggtggtggcgatggtttcatgcaggtcccggaaccaggcgatccggtcctgggatgggatgtccatcaggaacttgttctgcacgtctttcaggatgtcgaacgcggcaaagccgttccccttgtagtgggagagggcgtctttggcgtacacgtaccagtcgatgggctgcatgccttccttttccatcagcaggcgctgaagctccgtgcggaagaacgggtgcagcggggtttgcttgagcgcttccccccaggcctggatggccttgtccttgttgccggctgcttcgtccaggcgggcctgcgcggcccacaggtaggcctggtccgccttggcgttgtccgcaaagacgttttccatcagcaggtaggaggtgggggcctgtccgccgaagatgtggttgtgcatgcctccgtccggtccgccgaagccgcctttccattcaccgcgcttcacgcgcaccgcataggcgcagtggccgggctgccccaccgggtaggccgggatgccgtgggcctgggcagccatggtgccgaagtaggagaggccgccgcacacgccgccgatgacctgcgtgttttccgcggaggtgttgacgtcgcgccacggcacgtagaagagaggcccctggatggtgtctccgaagaagttgttgcccgtgtagggggcggcccagcaggcgtccgtatagcgccgccaggggaggttgacgtgctcattgctccattcgtaggatttgtcgtcccacgtatggcccacgacgaagcgcatttcccacgggcgcagcttgatgaagccgggatgcagcttgttttcctgatgcagtttcttgaatatctggtaacggcgcaccgggttgctgttggcggagttggttttcagctttcccgccatggggcctgtggaaaagacggaggcaagcccggtggcgagggactggtagtcccggaagtccgcgctcctgctgtccgccttccagatgtcggaaaggatttgaaggccctccggggagttttccggaatcaggcccgcgcccaggtagagttccatccatgccgggtcatgtaaaaaggccttgatgaaggccgcgtcctgcgggcttttggagaaaacggccttcacgttgtccggtcccgtgacgcgcaggagctcgtgaatgtccagcaggtggcggtattgcttgtcctgaagcagtttttgctccgatttggtttgttctccagccttcaggagggaggagcggagttccgtttgcagaccggcaaagtcacccgcggctattttctgcgccaggggggcaggaagctggctggcggcggacggcgtttccgtttcaggttccgtcagatcctgcgccatgcagacgggcgcggcgagcagggcggtgcagagaagaagatgtgaaatattcatgtggaaaagcttgtttaagaatagcggaaaaaaggagccggagccagtttgttttccgacttactacggcgccggaacagtatttttatcatccgccgcggggcatctttcagcataaatggtcacagagcattttcacgcccaggccgatgaggatgagcccggctcccgcttccaggtggaaggtggggaagcggtgcagccgccgggtcaggaagaagcctgccgccgtgcacaggaaggtggtgaagccgatggcggcggcggggaaaagcacggcgtggagggtgggggatgcgtcgcactgggcggaggataggtagatgctgacgcccgccaccagcgcgtctatgctggtggcaatccccacggccaggagggtgggcagcgtcaggctggtgacgtggggcatctgctcttcttcgttgcggtggttccagccctcgcggatgacgttgacccccaggaaggtgaagacgacaaagcccagccagtggtcccaggcggcaatgtactggtggacggaacccgtaagcaggaagcccagcacgggcatcaggaattgtcccgccccggtggacacggaaagcttgatgccgttgctcaggcgtttttgcttaatgagcaagccgtaggagaacgccacgacaaaggcgtctacggacagggcgaaagccaggaataacaagtcggcaagcggcatgctcattgcggagaggcactctaggacatcccccgcaaaaagcaatttttttgttccacacggttttttccaggttccgggtgcatgggagagagaagaatcggcacgttccccatgagggactgcccaaatgcatggaagtctgttgtagagagacttttccgtttttcgtcaggagattcgcctatgcaatattactcttttcaaatgcaaaaactgctgaataacagcctttgcgtgatcgggggatcagttaatttggcgttggcggtttcttttacgcccaggtgcagtaattcaacggaatagcgattgtcatgaagaagataatgagaatgggaaaattcgtggtgttctctgtttttagaatttccccttgatagataaaaattttgtttattcattaatttactcaacgtcaatattttagattacttgcatattttcttgcttaagaaaatgaatgagacggtaaaaagtaatgcggcaatagatgaaaatataatagaaaatgtgctatggaaccattcatcaaaacacagttctctaagtccggaacatacacataatacgttgaagatagctacactaacgagaataaatttcattttcaaagggtattaagcgaagtaatttaatcctgagtagtgaaattctcaagcataaaggcctgaaaatgtttctgcaggagccgtaaatttcccccaatgatattcccggcgctacggctccataaactgaatgctggaagagggacatttcttccgtccgtcatgcggtgaagaagaaaggagaggattacttgcagtattttttcatgtagggcagcacggcgtttgcccagatggcataacccttttccgtaaagtgcaggttgtccctgctgatgccgggcaggagcttgcctgcggggtccagaaagcgcttgttgatattggcgtaggtggtgcggggcagtttgcactgggccaggatggcattgattttatcattgtgctggcgcagcttgtcctgcggccccgtgccgcgggggaaaatgcccagcaggagcacatgggtgtccgggaacctgaccagcaggtgctccacggcgcccagaatgcccatggccgttttttccggagcttccccagccttgaaatggccggtgttattggtgccgatcatgacgatgcagagtttgggttccgtctgggccggtatgccggaatccgtgatgcggtaaatcaggttggtggtctggtctccggaaatgccgaagttgcagggatggtagggtttgaattccttttcccatacttgttttccttctcttttccaatagtccgtgatggagtctcccaggaaaaggacgccgcagggattgtttttcacctgttccacctgctgttcatactgctgcctccaccattggggctgttcccgcggcaacgggagcaggggggacggcaggtcggccgccgtcgccatggagagggaggccaggagggagaacgcaattgcatgcaaggttttcatttactttcatagtatacgcatgttttttttaaacgttacatgaaagttgtggtctttttccgcttctgctgtgcgctggcagctcttgcgccggggcgttcccccttgccagattccggggggtggtgtagcttgtgacagtatgagtgaggtatccctgcagcatggaatggcgcgccagatggccgcctcccagtccatgcaggccgggatgcagattctccaggcctccgctctggaattgaagcagcttctccgccacgcgctggagaccaatcccatgcttgaggaattgccggacacttctccggaggccctggaggacggcccggacggagacgcctggaatgagcgggaggacggctggaacgagtttacgccggaaggccgcccatccgcggaggccgccgcacgccgcgatttcatgtatgagtccatcgtggctccggaatccctgaaaacccatttgacggaccaggcgcagcattccgcgctgaccgggcgcgcccgggacgccctgttcctgctgattgacgccctggacgaccgcggcttcctgacggaatccccgcaggagctggaggaacgggagtgcttcagcatgcgggatatgcaggaggccctggccgtactgagggggatggaccctcccggcgtgggagcggtggatttgagggattccctgctgattcagcttgagcagcgcggcctgaagcgttcgcttgccttccgcctggtcaaacgctgctggcgggagctggcggcgcacaagtatgaggaggccgcgcgcctgctggacgtggagccggaagccgtggcggaggcccttgaagtgatccgcagcctgacgccggatcccggctgcgcctatgctcccggcggcaatccccatctgcttcctgacgtcatcgtggaggaagggccttccggggttctggatgtagtcctcacttccgagtacctgccgcgcctgtccatgaatgaacggtacatggagctgatggcggagagctccggcagccgggagctcaggcagtatctccgcaaggcattccgggaagggcaggagctgctgcgcgccctggacatgaggcaggagaccgtgctgcgcctggcccgcgccattgtgcggcggcagaaggattttttcaggttcggcccgtcccggctgaaggccatgggcatggaggaggtggcggaggaaatgggcgtgcatgtctccacggtttcccgtgcgtgccgggacaagtacctgttgtgcaagtggggaatgaaggagctgagggcctttttcagcgcgggcgttccggctgaggggggcgcttccccggacggagcgggcgcggaggccgtggcgtccggcgccgttcaggagctgatgcggcggttgattgcagaggaagattcttccaaacccctcagtgacgccaggctgaccgccgcgctgcaggagcagggggtgaacatcgcccgccgcacggtggcgaagtaccgggagcagatgaagattctgcccgcctccctgcgccgggggatatgacagtccactatatttttttaatggtttattgatagtttattatcaataatttatgtcttgttctgcgggaatgctttccctgtttttatttccggcggaagaggcggttgactgatgcggctttggtgctatagtccccgctttatcgtgatgcgtacatttacctggcctattgccctgctgctggcggggcttctttttcagacggtggcgtttgccgttctgaatacggtggttccgctgtggatggaacagtctgacgccgccacctgggaggccgggctggtgggggcttttttctttctggggaacctggcgggcacgctgatggccggcggggtgatccgcaaggccgggttcaagggtagctaccagtacgcgtgcgttttatgcgcggcgtccaccctgctgctgcttgtgtttcccggcgcgctggcctggagcggcctccggctgctgacggggataagctgcgccctggtctgggtggtggtggaaagcgccctgctgagggccggaacgctgaaaacccgcggcattcttctggcatcctacctggtggtttattatctgggaacggtgctgggccagctcctcctgggctggttccccagtgacatgtccctggtggtgacggaggtatgcgttctgtccgcagtgggcatgattcccctgctgtttgcccgcctggagtctgattccgcgggcgccctgtcttccacccatgtggaggttcggacgctgctgaaacgccgcagcgtattcctgggcgtggtggggtgcgttatttccggcgtggtgctgggaacgatttattgcctgatgcccctgttcctgaaacaccagggcatgaaccactcctccgtggggtactggatggccctgctgattgccgcggccattctgggccagtggcccatgggacggctggcggacaagtacgggcgcgccttcgtcatgaaatgccagtccctgctggtggtggccgcctgtgccggactggtgctgaaaggcggcctgatggccccctccctgatcgcgctggggctggcgggtttctccctgtaccccgtcgccatggcctgggggtgtgaagaggcctcacgggatgagctggtgaccatgaaccagcttctgctgctgagctactccattggcacgctggccgggccttccctgacctccttcctgatgcagcggtattccgacaactggatgccgatggtcattgcgctggtggcgctctccttcatgcccgtgctgatgctgggcggcggccacggaagaagaaagctgtcccggtaaaagaagagggggagaaagaggcgtcagggttttttctggtccgccgcggcgtttttctccggtttgggcacgtcattgtccgccacctggtgaatcatgtccgtcagggcgtgcacatagtcctccgtatgggaatccgtaatggcgtacttgcacaggcatgagaccgtggggatgcccagcgccgcgtaatggcggtcattgcccgcaatggcggagggctcccggtggaaggtggggggagcctgctcccaggatttggtgaagggagtggcgcactggcccgcgaattccttgccgcggagcgtggtcatgaacagcacggcttcctgcggggattccggttccggctgtttctgctccgcagcggcggccagttcctgcggttccaggttgatcatgcccaggatgttggccgcgccgatgctgccgctcagggttttggcgtggacggaggctcctgaggaggcggatgcgggttccgctccgtttgcatacgcgacgaagtaaatgttgtggttggtgggaatgtccttgaggcccctggccgtttccagcagcagggccgctccgcttccgttgttgaaccgttcgctggaatcgtaattggcccccaccacgatgctctggttgttggaatacagtccgggcttgtaaaccaagacgttgtagatggcggtcccctttttcgcatcccctccggaaacgggctgcaaggtgacggcataacccatgtccgagaagcttccggcgatgtatttggcggcggcttccatggatttgggctgccgggcgtttctgggcccgatgtctttttgcaggacttccgtatgcttttccatgcgcgcgcccaggctccgcggcgtatccgggctgccggaggaggaagcgggaaggagggtgcaggaggagaggccggaggccagcagcaggaatccggcggtcagggcggcgtgtttgtgaatgcgggtcatctcttacagggtttcaacgtaatgcagttcacgggcaatctgggcggccaggggaattttcagatggtccggcaggacgctccacgtataggtttccacctccaggtgcgggttcaggcccggatggctgcggaggaaggcgtgcgttttcaggatgaaatcctccgtgccccgcaggggcggttccggggaggcgtacaggggaatgtggtaatgaatgcgccattgggaatcccgcgtttcttccgcgtaatcccgcccgtaggccagggcgttcggcaggtccgggaaaagcatggttctgccccggtggaggatgctggtctggtggaaataaacgccgtcgtcaaactggcggaggcgttccaggtcttcctccccgcgtatgcggcattccagggcgttggagaactgcaccttgcagagggagatgttgttttcctcccaggcggagagggtgtctgccggttcctcccgcaggatggcgaagtggcaggtgtcatacgtcagccccaggtggcgttcaatgagttcggggcggcgggagtggttgcgcaggccgttgaaaaagcggatggcgccctccgtatcgtggaaatggccgaatggctccggctccagcccaagctgcatcaggcgtccggtctgcctgctcagcacgtccaggaatccgctcatggcgtccagacgggagaacatgcgctcctcctccgcatggaaccagctgtgggaggcggggagcgtgctgacggtcagcctgtctgcgttttcatccccgatgcgggccaggatgcggaagaggttgcaggtgtattcaaaacgttccggcgtggtccagtccggctggaaaacgtgttccttcacccgctggccgtgaaagttcccgtagggaaagccgttgagggtttccacgcgcgcgtcgtgttcgtccagccatgatttcagggcttccacggcgtgcggcgtttccagcagttccgctgccgccctggcggacaggcgcaggccgatgcccagggggcggtccttcaggggggaattcagtgcggccagttcctgccggatgcggggaacgtgggtctggagggcttcccgggtttccgcccaggattcggcgggatggatgttggtgcagtaggaaagcatggcggggcagtatgtgctgttttggggaacggcgttccactccgggggaaaatggtggaaaatgcgtgcgcatgggacgttcctcaagcctacatacggttccgcagtgaggaaaaatttcatggaattgcggcttttggcgtcatccggaagcgtcctttccggcggaaagaatggctttgaaaaggctccggatatatggtagtatctttccgttatgcgtccgttcttcttgctccttcttggtgttctgttccacggggacgtcctgcgcgcggcggaggaatcaacggcctggaaatcctccctggtccggttcagccgtccggcggaatggaaggagacgcggccccagaagggaaccggggacaactcctgggcgaaggacgccacgccgatcggcaacggaagaataggagcgctcatttacggaggcgtggaaaaggaccgcctggagctgacggaaatcagcatgtggtccggaggtttttgcagtgcggaagccaaggacaaggggccggattccgtcaaattcggatcctaccagccgttcggcacgctggaaatcacgtatccggcagcagagaacgtgcaggattataaaaggacgctggatgtggcggaggcgctggcctccgtgtcctacaactccgggggagtccgttaccggagggagtatttcgccagcgttccgcaccaggtggtttccatgacggtgcagggggacaggccccgttccgtggaagcctccttccgcttggcgaccttgcatcctcaggacaggattacggccacggccggagggggcaggggaatgattctgatgcagggttccctgaaaaacggattgacctatgaggcgcgcattgccgttcttcccaggggtggaagtgtcacggctgacggcggctccatcaccgtccggcaggcggattcctgccgcgtgctggtttctctggctacggattacgtgctggacgcttcccggaactggaagggggagccgccccgcaagaggaatgaagccgttctggcccgtgcgctcaaggcggctccggagcagttgaaagccgcccaccggggcgcctacggcaagctttaccaccgcgtttccctggacctgggagagacggaggacgccacggcggaactccccgtcaacgagaggctgaagaggtacaggcaggcggtggacgccggaagggacgcccgtgatcccgatctggaggaactggtgttcaacttcggccgctacgtcatcctttcctcctcccagccggggaatctgcccgccaacctccagggcctgtggaattacagcctgattccgccgtgggattccgactaccacaataatatcaacatccagatgtgctactggggagtgctcccctccaacctggcggaatgttatgacccgctggtggattacatccgggaaatggcgcccgccgcgcgtaaaatcacccgggaggagaaagagttcaggacggctggcggcaagcctgctccgggctggacgtccaggacggcccagaacatttacgggggccagggatttaaatggaacaagcccgcttccgcgtggtatgccctgcatctgtgggaacgctacctgttcacgatggacagggagtatctgaaaacgacggcttacccgatgatgaaggaaatctgccgtttctgggaaagccagctcaagcccctgcacacgggaggaagcaacttccggacggaggacaggaaggtgacgccggaaataatctcccgggagttgaaggacgtgaaggaaggaacgctggtggctccgatgggctggtccccggaacacggccccagggaggacggctgcgcgcatgaccagcagatcgtgtgggaattgttccatgataccgtacaggccgcggaaaccctgggcgtggacattgcctggaggaaggaactggccgccaagagggatcttctggccggtcccagggtgggggaggacggcctgctgctggaatggatgatcgcccgcaagccgggcggctcctgggacccgcgccaccggcacacctcccacttgtttgccgtttatcccggcagccggatcagcccggaaaagacgccggaatgggcggaagccgcccgcaaatccctgctggcgcgcggaaccacgggggattcccgccgctcctggacctgggcgtggcgcgccagcctctgggcgcgttttctggacggggaaaaggcttatgagatgattcggggcatgatgcgccacagcatgatggacagcctgttcaccacgcatccgcccatgcaggtggacgggaccatgggcatcgtggccggctttgctgaaatgctgctccagtcccgcaccggccgcctgcatcttctgccggctctgccggaagcctggaaaaacgggagcgtgcgcggactgaaagcccgcggcaacattactgtggacatggactggaaggacggcagggtaacgcagttccgcctttcctccccggtggcgcaatccgtccgggtggccgccaatggcacggaaaagacgtatgaactgacgtcggagacgcccgtcaggggcagttgaggacccccggtgtcccttcacgccgttacagttgtttttcagcaggtacagccttgtttctgttgtaaggcccccatttgccaagggagaaatgcgtccgctggtgcccggatgaacgaaagaacttattcttgtagcggaaagtggggcacggaatgagtttttgacatttccacagacggatattaaaattagtaaaatggaagatgcgcctttgaatgcggattttatcaatttaacggcggacaatctggccagtgaacatttatgctgcattatccgcagccgggtcccccatccgggcgttgaagcaaagcggcaatggctttccagccggatcagggaaggccacgtctttagaaagttaaatgccaagggagtggtttttattgaatatgcccctctggagacggcctgggttcccatccttggggacaactactattatatatattgcttgtgggtttccggcagctacaaggggagagggtatggaaaattgctgatggaatattgtctggctgatgccagggaaaagggcaaatccggcgtttgcatgctcggagctgaaaaacagagagcctggcttgccgatcaatccttcgcgaagaagttcggctttgaggcggtggatgctgtcagtcatggctatgaactgcttgctctttcctttgacggaacaacgccgaggtttgcgccgaatgccaaaaaggggagaattgagagccgggagctgacaatttattatgatatgcaatgtccctttgtgcatcaaaacattgagatcataaaacggtactgtggagagaatgatgttccggtatctctcatcagggtggatacgctgcaaaaggcaaaggaattgccctgcgtcttcaataactggggcgtgttttacaaggggaattttgaaacggtgaatttgttattggacattgccaatctaaagagaatcctcaagaaatgagttgagtcggcgctttcataaattattcaggctgtgtggttataccttccgggtgcaaggcattcttcctttcctgcctttttcactaacagcaggcagggaaccaatgcttattgcgggttttcatgctccgcctttatgaacgtgagcgcccgttccatcaaggaacaggggggctgccaatggaacagcctgcctccttttacccctgcaaccgctgttcacgccaataaaaaacaggcacgccttgcagcggcctgttttctgaacggggaatccgccccagcctgaaagcccgctgtaaaggcggaaaagctccaggccggatggggaatgagttttttactgaacgatgcccagcggggcggtcgtcttccagtctccgcgggtgaagtccgggaacacctggggcatgccgccctgggccacggagtattcggaaagctcggagacggaggaccagaaggcgccttcgtatacgttctggtccatcggttcgcccttgcggaggcattcgatgatgcggtaaagcatcacgaagtccatgccgccgtggccgcccatcttcagggccagcgggccgactttcttccagagcgggtgatcgtacttttcaaaaatgggggccagtttttcgttgccttcaatccattcgtgatagttgccgttgcccagcttttcaccggccacgcgggtcgggaagccggccagcgtgcccagggtgccctgaatgaggttcaggcgggagtaggggcgcgggctggtttcatcccattccaccaggatggtgcggcccatggtggtcttgatgatggaggtgttcatgtcgccgcaggcgaagtccagcttgttccacttgtggtccgccgggaaattcttcttggcataggcggcgcggcccagggccgggctggagaaggaaacgagcctgccgaagcagtcgtccttgcgggccaggttcatgtactgggcgatggggccgaggccgtgcgtggggtagacgttgccgttgcgcttggcgtagtggtaggttctccaggagccggtgccgcggtccacctgcttcatctggccgcgcagttcgtggatgtaggcggcttccccgtacagcaggtcgccgatgacgccctggcgcaccatgttcaggtacatgagttcttcacgtccgtagttgacgttttccatcatcatgcagtgcttccgggtttcctcggaggtattgacgatttcccagagttccttgatggagacggccatgggcacttccacaaaggcgtgggcacccatcttcatcacgtcgcaggtgacgcggcagtgccattcccagctggggcagacgatgacggcgtccggcttgacttccttcatcatgcgcttgtagtcttccgggccgttcgtgaaaatgggagggcgcttgcccgtcttcttttccaccagcgccgcgttgcgttccgcccagtccttgtacaggtcgcagatgccgacgacttccgcgccttcaatgacggccatctggcccacgtgcatggagccgcgttcacccacgccgacaaaggccacgcgcaccttgtccagcttgggggccctgaagccgcccatgtagatggcgccgggcttgcgcgggggccacgtggtcatgggaccgatgttgttcgggtccggaacgatgatctttttgggagccaggggagctacttcctgggcgttggcgaaggaaccggcagccagggcgccagtagccagacccagggtctgaaggaaacgacggcgtgatgatgaattatccatggatggtaattatatggaaggatttgagtccttagtttgccatacatacccggacttgagaatctttctttcacggatggtgcaaaaaatgcattctcctgcgggagagaggtgctccgcgccggaggcgtcaaaagaggggaaggcaggctccttccgggaggcgggcatgaaaaaggccccattcctgccgcagtgcgggaaggacggggcctgtcaggtgcatcacccggttgtgccgatgttgcatgccgttgcttgggagtgaaggggggtgagcgtatcgctgcaccgcgttccgaaggatcggccctgcatcggaggacatccggagagtgttgcgtggtgtcgccggcgctggctgttgtttcctttcctggcgacggggaagatcattccgtttcctgcggcttctgttcagggaaccttgacggggtccgcatgccgtggaatcgggatcatcttcccggtcgttttgaagtggtccggttactgagccgtgccggcggcgggaagttttgacgcggcaagcctggcataagcttcattcagcgccttgcccagcctggggcggaaaacggtggtggtcggcagctgcgtgccttccatgtcacaggagcggaggatgtcgggaatggacggggccaatgcacgtttcatgatattcatgcagtcttccaggtccactccgtatttttcctccatcaggttttcaatacggtccgccatctgctccatcctctcaatctgttttttagtcagaatcggctgaatggtcgcgttcgggtcggggacgtagctggtcagcatttcaatggcccgtttcaggtcgtccggcaattccgttgcattgccgctgttgagaacctgagccagaacctgatagctgctggtagcgttttcgtcataatcatgaatgcctgaggccagcgccacgcctgcgatgctctgcacgtagcgggctacttccggggaatagttgccttccacaaacgtggagggaacgtcatccgcgtaagcctgcatggcggcctggcaggcgagggaaccgacggtacccacgcacagtgtcttgatgatggacgagatgattttcatgattgaaactccggttgaagcttcccgactggaacggtccggtgaaccgtttgtagcaagtgagactgtgcagcccctgatttcgttcaaaagtttttttgaatgattaaaatcatgcgcccgcacggcttccctaccttccggcggaattccgccttccgtaacttttccgcggccccctgcgggaggcggaacggttttcctgcatggagtttttcctttcccggtgcgtgccgggaaccgtctgcaattcagacggtatggtggcgctggaggaatggacgggaaggaggcgccccagcagcttgtgcacgtccctggcttttttgatttcatccggggaacagagggcgatggcttgcccggcggctccggcgcgtgccgtgcggccgatgcggtgcacatagacttccggttcttccggcagatcgtagttgatgacgagctgcacgtctttcacgtcaatgccgcgggcggcgatgtccgtggcgacgagaatgggcgtttccccggaacggaattcccggagcatgcgttcacgcgtgccctggctcttgtcgccgtggatggcggaggccgggtggtcctttccggtcaggaaggaggccaggcggttcgcgccgtgcttggtccgggtgaagatgagcgtgcggcccggctgttcctgctgttccagcagatccagggtaaggggccttttttccgcctgggagccaaccatgcagagggactgttccaccctgtccgccgtggcggccgggggggtgaccatcaccgtttccggttcctgaagcagggactgggccagttgcagaatgttgtccggcatggtggcggagaacatctgggtatggcgtttcttcgggattttggcgacgatctttttcagggccggagcgaagcccatgtccagcatgtggtccgcttcgtccagaatcagggtttccacaccgcccaggttgacggtctggcgttccagatggtcaatcagcctgccgggcgtggctaccagaatatccaggccgccggccagcttcttgaactggggggcgtaccccacgccgccgaagatgacggcggtggacaggttcagccctttggcgtaggcgcagatgttgtcatgaatctgcgcggccagttcccgggtggggctcaggatgagcgcccttacctggcgggcaagcggctttctgggatgttctgaaaattgttgaataaggggcagggcgaacgcggccgttttgccggttccggtctgcgccagtcccatcaggtccttgttctgcagcagcagggggatgcaggctgcctggatgggggtgggggtcttgtactccagtttctccagctggcggagaatgggagccgacaagccaagctccctgaatgtggttgataccatgtttattgatgtgtctgtgaatgcgcctcggctgcaatgaactgacggaatcacgacaatagcggaacaaaaagaagcccgcaggagcgatactgaaaggatcaatacggagacgcccgtattccgccaaccgcaaatgactatcaaaaatcaacaaccaagcaccattcggcgggaacagggccataaaagcacggcaaaggacagccgtcaagagaaataaaaacgtcctgcacgtcatgaatccttttccgtcagttccggaagaggctggagatggaacccggttggcggccatcaaggaggaacggcctgtaggagcatggagcgcggcaagtccttgcggcaactggatactggattgagctttagctaattacttctttaaaaaagcttgtgccctcctgcggaatatcaagtcagtttccgtaaaggcctgcggctctcttggcacgcatcacaggctgtccggagggatgtatttcagcgctgcagaaatttgcgcgcgcccacgcagtaaacggccccggaatacacggtcaggatgatggagccccacagagtgaactggtacaggaaattggaagctccggatccgtgccacaggcagagcgccgcaagctggtccaggaaggagggcaggtattccggcgtgtgcgtccaggtcagggccagcagggaggcgatgcagaaagccagctggaaggcggttttccatttgccggacgtgcccgcgggaatgatgacgccgtggtcctgggcaatctggcgcaggcccgtgaccaggaattcccggctgatgatgagaatggtgacccagacggggcatagccccacgcccgtcaggtaaatgaaggcggcggaaacggcaatcttgtccgccagggggtcaatgagcttgccgaaggtggtgacctggttcaggcggcgggccaggtagccgtccagccagtccgtgcaggccgccaggatgaaggtgaccagtgcggctaggtatccccaggaatactggtccgcgatgctgactgctgccgtgaagacgactaccagggcaatccgtgtcagggtaatggcgttaggcaggttcagcatacgcggtttattagggagcagatgccggtccgtagcaagcttttttgcaggattcaggaattaaattcccggaatgcggcacacggaaaaaatcagacggaacatggaagggagaagagatggacggagggcgcgcatcgggcgtttttgccttgagctccggcgggatggaacaggcggaagcctgcggcatgatgcagggaacgggtttctgtagcgtcgatgggaaacagcgtagggtagggatggcggcctattccccgaccagcttgttgaagtcttcctcggagatgacgggaacgcccagcttgagggccttgtcccgtttggagccgccgccgctgcctgccaggaggtaggaggtggatttggaaatggctccggtggctttccccccgtgagcggcaatgagctgttcaaagtagtcccgcggatggctgagcgttccggtgatgacgaaagtcttgccggacagggcccccgccgggatttccagaaggttggcccggtaggactgggactggggattgatgcccaggccgcgcagaacgtccatcgtatggttccccgctgcggaggtgaaaaagctctggagggatttggccgccgccacgccgatttcggagccatagctgaacttggccgtgttcttgcgcaggtagcccgtttccagatagggggcggtcaggcggtcgatttcatccgtcagttcctgatggcgctcctgcaccgcctctgcggaaagcgcgccttccttcaccgcctttctgttttcacgggtgttggggttggttttggcggcttgttccatcagctcgtcctggcgcacgatgtcccggaggtaggaggagtccgccacatgctccaggtccgggtgcgtgtccgccagcgccttggcgactacttcccctaccaggggaatgccgaaggcgatgagccagcgttccagcggaagctcgcgcgcgttttgcagggcgtccagcgctttctgggcgttcttttccccatagcggcgcggttcctccggcgtgcccaggttcaggttggcgagctgttccagcttcagggagaagaggtccagcgcggaggcagccaggccggagcttctcaaagcttccgccacggaagagccgatgctttccacgtccagcgcggagcgggagcagaagtgggtgatgcccgacacggcctgcgcaggacaggtgaagttggtgcagcgccaggccacttttccctcctccttcatgatggggttgccgcacgcggggcacaggccccccgtggcttccagaatgctgtagggcctggcatccgccggacgtttggaaaggttcactttcagaacggcggggatgatttcccccgccttttccaccagcacggtatctccgatgcggacgtccttccggtcgatttcatcctggttgtgaagggtggctcgcgccaccgtggagccggacagcagcacgggcttgagttccgccacgggcgtcagcaccccggtgcggcccacctgcacgatgatgttcagcagggcggtttccttctgttccggggggaatttgtacgccgccgcccagcggggggcgcgcgccgtggctcccagggcctcccgggtggccatggagctgattttaatgacggcgccgtccgtgccgtaggggagcgtgtggcggagcctgtcaatgtcccgcacggcctgacgggtggattccaggctgtccgtataatacaccggatcattgcagggaatgccgcagtggcggagcatgtcccagaaatcctttacattcgtgagttccggcccttcatacgcgccaagcccgtgggccaggaaggccaggggacgggcggccacctgccgggggtccagctgcttgagggttccggcggtggcgttgcgcgggttggcgaaggcggggagaccttccgcgtcccgttcctcatttagtttggcaaaggcttcattgggcatgaagacctccccgcgcacttccagcacgggaggggcgccagggggaagggtgagggggacgctgcggatggtgcggacgttggccgtcacgtcatcccccacgtctccgtcccctcgcgtggccgcataagcgagccgcccgtcgcggtacatgatggagagggctaccccgtcaatcttgggttccacggagacgggcaccgtttccgttttcagcgccttgaccagcttgttgtagaattccaccagttcctcgtccggaacaggggcgtcgcgctgctcgaaaatgtcgtcaatggacagcatgggcaccgcgtgcctgatctggttgaagccctggagcggcgccccccccacacggcgcgtgggtgaatccggctccgccagttcgggatgggccttttccagcttttccagctccaggaacagggcgtcatattccgcatcggagatctccggttccgcctgttcgtaatacagccggttgtggcggcgcagttcggaacgcaggtaatccacgcggttgcgcacgtcttcctccgtcttgccgggctggacgggggcggcgctttcctgcggttctccggcttgggatcccgcttcattctttgcctgctgtgacggctgcttgccggccgccagggaaaaaaggtcttcctccataaggaaaatgagtggaaaagagggctatttgctcagtttgatgacggaacagggcgttttggagtgttcgtgcgccttgaacagaaccgttccgttgacgacgggcagggcggtgttgtctcccagcagcaccgctttggagtagcctgcgggaagggagacggaggttccttcctcgtcctcgtatccggtggaatccagcggctgcatgcgggcgtattccgcgccttccgtcagttccttcatggtcccttcgctgggcggctgggccggtcccttgtccggcggcggaaccaggaagacgaagatgtccccctgccggttgatggaggcgggctggtccagttccgtgaaggcccgcgtgccgtacacggcctccccgttgatcttgagccactggcccacgccgcgcatggtggcggccactttttccggaacggttccgtccgccatcgggttcacgttcagcaggaggttgcctcccttggtgacgcattccaccagtttttcaatgacggtttccggagacttgatgttggtgtcataccggttgtagccccatttgtcgcttaccgtcatgcaggattcccagtccacgccgggatagccgcgccgggggatgaagcgttccggggtgatgtagtccccgcagcgcaggtccagcgtgccggcctggtcccggttcaggccggaataggcgtacaggcggttgttcatgatgacgccgggattgatggagcgcaccatgtccatcagttccggcgctttccagcccctggccccttccatggctccctgggaataatcccaccacatgatgtcaatgggagcgtaacgggtcatcagctcccggacctgggcgtgcaggtacttctggtaggcggcgtgatcccgcgggatgttttttcttttaagcatttccgcctgtcccgcggggtagcagaggtccggacagatggtgttgtcataggacgggtggtgccagtcgatgacggagtggtaaaggcctaccttcaagccgcgcttgcggcaggagtccacgtattcgcggataatgtcccggttcacggcgcttttggcgtcgtaatccgtctgggcgctgtcaaacaggccgaagccttcatgatgcttgctggtgagcaccacgtattggcaccctgcgtcccgggcaagccgggcccattcttccgtcagcccttccttgggcttgaacaggggcagggcttccgcagcgtaggaatccgtgtccacttccacgtttttctgaatccattcggaaccgccgggcttgcctttccattccccggccagcccggaatacaggccgtagtggatgaacatgccgaatttggcgtccctccaccattccatgcgacggttgcgttcttccgccgtttccttcacggcagcgtggttggcgtccgcggggaggggaagtccgggggcggctgccgagaattccgagggaaccgtggcgggggcgttttgttccgtcctgccgctgcgcagccgggccgcgaactgttcatccagggccagcgtgggctgcccgttctccgtaacgattttagtggcggactgctgggccagagagggaagtgccagggtgagggccagggcggcaatcgtagcgattttcatggtttttcagggtggtatgaagcggggggagaaagattaagccggtcaaatgacgtccgtatccgcgtaactgcccaggattttcagcatggagcagtgctgttccagctccgggagggtctcccgtaggggggattcctgaatgtggcctacggcgtctatgtaaaagacgtactcccagttgatgaccttggaggggcgggattcaatgcggatcaggttgttgttgtgccgctggaagcagttgatgacttccgccagggtgccgggcttgtgctggatgcggatgagcagggatgtgcggtccctgccgctgggctgcgtttcctggcggccgatgacggcaaaacgggtggtgttgcaggcctggtcctgcgcgtcttcttccagaatgttcaggccgaacagttccgcggccagcgggcagcccagggacgccgcgcccatggaggcattctccttggcaaggatgctggccttcgtggtggaggaggtttccacgagctccgcgttcgggaagtgccgcagaatccagttccgcgtctggccgagaacctgcggatgggaatacaggatgcggatgtgttcccgcgggatgtccgccatcaggctgttgcggatgttcagattgatctgggcgcagattttgaggggggaggtgacgaagaggtccatcacggcggtcacggagccttccgaggagttttccacgggcaccacgccgtactgggccttcccgcggtccaccatgtcaaacacgtccttgaagctctggcacgggataagttcgcagcttttaccgaactgcttgagggccgcctggtggctccacgtgcccttggggcccaggtaggcaatggtaagccccccttccaggaagaaggagcaggagatgatttcacggtaaatggcctggagggaggcctccggcagcacgcccgcgttcaggcggttcagcttgctgagcagggccgtttcccgttcgggaacgaagatgggggaattcccctcctttttaatgcggccgacttcctgcacccattcggcgcggttcttaagcagctccacaatccgggcgtccacctcgtcaatggccagacgcgccttcgtcagggcgatggtctgttcatccgtgtttccgcttttctgctgccgggggggattggccggggaggcggaatccccgtgttgaatgttctccatgtctctgtgaaagctgtgtgtttaaagccgcgtcagggtagcggttccggaggggcaaatcaagattaaagggggggcttctccatggcggatttttcttgcatgcacggaagatgcagggtaggtttgcctctctttaatatgatgaaaaaaacattgttgccgactgccgtggcatgtttcctgggcgccgtttcccagatagcctgcgccagcggacaggacgtgaacgtttatgtctcccaggtctccctgtccttccctgatcctgccggcgtggatgacatgtttaacagaaataaggatgccgtggaggtggtgctgggtttcgttgctcccaagggctgtaaattcgttaagggcggtgaggactcacagcttgaagttacggatggccgcggcgccaggacaaaagccaaattcgacaatttctttacccgcattggtgattccggagcctttgccaaacattccctgaggctgaaacagaaacctgtgtttcccctgaagctggacggagtggtcaacatgaaggtttccgaaggaagcaggacttttccgggccaggagtttgacgcgcggaagggcgccaaattcaaggtggagggcatggaaatcaccgtgaaggatgcaaaggaccacggcaaggcttccggtgaggtggaactggaattcagtgatacgctccatgtggaggagataacgctgactgacgcggagggcagcaaactggagatacccggcgtgtccaaaagttcgttcagcttcggttccgttccttcccgcacttatacgtaccaggtaaagaacatgcccgctaaaatgaaagctacggtggtggccagcaagggcgtcaaggccatggatgttcccgtgaaggtgaccgtggatttgaatgctccgcccaaaaagggggcataagggaatatttttatgttggactgttttttacaagggccgggaggcccttgttcccggttggctgtttgttgatgggacgcgggggcggttgttgagcctttgccgggagaatgggggccgccaaaaaatcggcggtttagctcttgtgcgttttctgtccagccgccaagttaggttccggccttcttcctgaagaaccgtggtgcggcgcgccgctgaattctttcttttcccgctcccggcaggtgaaaaacaaatgcaaattcctgttccttcgttcagcttttttcccggccttctcaagccggcattacctgcctgttttcctcctcttcagaatacgctccggcgaataatcttgcttgaccgttatttttttattgataatgatgggtctatgaaaaaatccatcaaactgtgctctgttgctctcatgctcgccggatgcggtgtggccggaatattttccgccagcgcggatactccggctcccaaggccggggaggctgccgtttccgccgtggggaaggctctggaaaaagccgattttttaaccaaggacaggccgaacccaaaagccaaatattatcttttcctgtattccgccagttggtgcggcccctgctgccgggaaatgccccacgtggtgcggacctaccggaagatccgccagaccgatgatgtggaactggtgctgttttcctgtgacaagacggaggaggccgccaaggcatgggccaaggaggaacggatgaaattccccatcgtcaagccgaagaaagggaacggcattcccggttacaagccgggaggctccattccacggctgggaattgtggatggcacgggcaagatcatcatcacagggcatcccgccacgcttctgaaagactggcgcaagttctgcaagccggaggaaggcaaaaaataggggcttcctttgccttttggcgctccctccgccgtttccgaaatacggaaaacagggccgcttcagctctgctccccgtttttcctcaccgggcgcggctccggaacggctccgtaaagcccgttgggaaagagctggagccacggcgtatattccggcgggatgggtgcttcaaactccatgcgctttcccgtgcgcgggtggtcgaagcccagccgccacgcgtggagcatgagcctgccgggtttcgccttctgccgggcgggtttggcgtaaatggggtccccgatgagcggatggcccagatggagcatgtgcacgcgtatctggtgggttctgcccgtgtggagcgtgcacaggaccagggaggaatccgtggccgggtctgcgcacagcaggtcgtagtccgtaatggcggctttcccggtgcccggattgaccaccgccattttcaggcggttcacgggatggcgcccaatgtgggtgaaaaccgtgccggagctttgggagggaatgccctggacaacggccaggtaccgtttttccgtgctgcgggccgcgaactgcgccgtcagggactggtgtgctccgtcgttcttggcaatgaccaggcagcctgacgtatccttgtccaggcggtggacgatgccggggcgttccacgccgccgatgccggagaggtccccgcaatggtggagcagggcgttcacgatggtgccgtccgggttgccggcggcgggatgcacgaccatgccgctttccttgttgatgaccaccacgtcttcatcctcatacaggatgtccaggggaatgtcctgcggccgtgcttccgccggttccggctccggaatgcggacggtgatggaatcaccgcgggaaactgggtttttaggcttggcgggagtgccgttgaccaatacgtccccgcttttgatcaggctctggattctggaacgggaaagctccggaaggtgggcggcaaggtattggtccaggcggattttcccgtcggcatcgtccgtggtcagattcatgatccgtggcgtttggtcaatggctgtaggcggagggcggcaggtcgatgaaggcatagtccagaccgtaaacgtccttgagcagatgccccagggcttttacgccgaacgtctccgtgaagtagtggccgccgaagaccagattgacgcccagttcatgggccatggggatgttccagtgggaaccctccccggtcacgtaggtacggcagccgagggctgcggcctggacaaggtcgtccccggctcctccggagcagatgaagacgtcgccagccggggcatccggggagtccgcccagaaagtttgaatggacgctccgaggacggtttccagccgctgcgccagctcccggcacgtgccggggaattccccgtgcgtacccagggaaacgccgtggtagtccagtccttcattggaacatggccggattccgcaggccttcgccagcagggcgttatttccgtacacggggtggacgtccagaggaaggtgggcggcgtaaatcgccaggttcccgtccatggcggctttcagcttccggtatgcaatgccggtaatgggctgcatggtctgccagaaaatgccgtgatgaaggaggagcaggtccgcccccgtctccaatgccgcatggatagccttctccgagccgtccacggcggcggctaccctggaaacggctcctccgttttccagttgaaggccgttcagggcgcgggatgcgtccggaatggaatccacggaaaggattccgtccagaaaagcggtaacggtttgcagatcaatactcatgcgggaggaatggtcagttgtcttccgagaggctggcgccgagcaggcgcacggcgtccatgttcaggataaagtagttgggggatgtattcaccctgccgtaataaaacctgctgtatccggcctctcctgccggagcgatttccagcgtgatgactttttcctccgtctccggttccggggcgaaggtgatgtcgctggggccggcctgggactgcacgggggccgcctccttgtaaacctggaggatgagtttcaggcggaaaacggggttcttcagggcctcgtgcgccgtggcgtccgtatagggcagccaggtgctcacctccatcttttccagctcgtccagatagcggttggcgcggttcggattgatgttcagggtttcatccttcccatccttggcagcggtccaggaatcgtccagacggtcgaatttcaggatcaggggaccgccggagccgatgcgttccagatgcatttccttgaggtcgaacctgctgaaagagaaaagcatctttttcttccaggccagggcgtccgtcagcaggtccttcatgtaggcgctgtccagcatgacgacggtgggcttgccggcctggcgggcgtaccaggaaccgtccgttcccttggagaaaaacaccgtcacgggggggcgcggttcttcaccgggcttgggcagcagggacatggtgagcgtcatcctgggattgtccagcccgtacacggaaaggtccgtagccttgtcagaggcgaagccggccaccttccccagcttgacggttttcagcagggaaacgagatgctccggattggcctcctggtagcgggagccttccgccgtgtacagccaggtgggcttgatgccctttttctcatcaccctgaataaagcgggcgatggtggggtaatcctgaaaactcttgcggatggaaagcccggtgatcttgtaatccccgatgtccgtcaactgcttggagcgcagaaggcccaggtccagcggaatgttgcgcacgccgggcacctccttgttggtctccgtcgtctgcgccagttcaaagacggccttgcggtcggaaacggtggccttcaccagttcggacaggcttccgttgtcggaaggggggtaaatgcggagcgtaacgggctgttcctccgtttgcagggatttgccgtcctccgtggggaggcctgtgaaattcctgatggagacggaggtgatctggtcgtccgtcatgtccggcacgctggtttcctccggattatacacgcgcacggcggtcagcttctggagcgtgcccagcagcacgtccatcatggccgggtccgtatccagggaaagggggtacgtgattttccaggggctgccgggagtcttgcgctccagggcgatgcgctggcctcggttgttgatttcaatggaggcgggcatggccggatgcaggagcagggggcggtggtcccggagctggcggatgccggacttgaacaggggcaggatattgccggtgcccaccaggatgcgggtgtcccgcccgtagaaatccgtctgcatgtaggtggtatcgtccgtggtcttgttctccggatcgtccaccagccagggagcgagggaccccagcgtgtagcgggccacggtggaggagcgcttgccgtcgtcgctcatctccttcagggtgatggtgacgggcgtcgtcttcacgccgaactccttcagggaggcggaatcaatcttgtgcaggggcagcgcgtccacgatgctggtggaatatgtgtactggaggatggccgccgccgcgcgcgggtccatgcggtcgtcccacggcttctcgcaccaccagacgccgttgggcttgcggcggaactccgcaacgtcccccacgcaattgatgcgcatccaggaaacctcgttcatctcctcccgggtataggggaaaagccgttctccggaactgaaggcggtgcgcccgatgatgcgggacaggttgccgtcaatggtcaggagcaccgccgcgccgatggcggcgagggtgacgaggataagaaggatgaagcggaatgtgcgcatgtgcttccggtgatgggcgtggtggagttaatggcggcgcgtgttccagataatcagggcaatcagaagcgccagcaggggaaggccgatgtttgtcaggagttccagaatgcccagggcgttgcggtccaggttcagcttcacggtcaggtcatggcgggagccgaggccgcgcagttcttcacggtccgtcatccagccgaccagcgtgcgcatgaagtcccgctgttccggcttgatttgcctgggctggagcaggtccgtattccccagcagcaccaggcgcccggtggtcttgttctggtttacgtccccggcgttcccgcggatgagggccgcgccgatcatcaggggccccgggttgtcttcccgcgcgtcaaactgggccgggaactggttgtacttggtttctccgtaataatcctccgtagtcaccagcagggggtatggcgtgatgcgcttctgctccatggccgcgttgtcggaatccaggatgagggagatgctctccccttccagcccggtgctggaattccagaattcgcgcgtgcagttcagggagggcgcgaaaatggcgttaatctcgaaaacggagcggttgcccctgttgcggagcatcacgcggtcattctgtgggcgcaggccctgttcacggaggaaccggtaaagctgtttgggcgtatcctgctggggttccagcatgaccaggatggcggcgttcgggcgcgcccagtaccgctggagcacttccgcctcctgcggggacaggtcgtacttggagccgatgatcatgaaccccgcggcgtcttccggaatctccttcaagccgctcatgcggatgggaacgagctgaaggttgacggaacggcagattttccccagcgtggtgaaaatgctttcctcctggctgttgctcagcgcctcgttgaaattgctcttgtccgccgcaatatacatcttgcggggttctccattggccgccccgtaaatgccggcggtcatcatgtcttcaatctggagggccaccgccttcatgctcttgccgtccgggctgggggcgtacaccacgaaggcgtctccgggcaggatgcgcacgtgggcggcgtccgcctgggtgccttcaaacgtcttgagcgctttttccgtgtcttcccgggcatcgatgatgaccaggttcttcttgaattcaatcccgtaaatgttcgcaatctcccgggccttgttcggctggcggagggggtccacgtactccaccttcaccttcccgttggaataacgttcgtactcctcaagcagggagcgcatgcgggtgtaattctgcgtggtgcgcaggaaggcgaacgtgatcttgacgggcgtcttgcggttctggatttccggagatttcagcatgttgatgctctgctgggaaatctcataacgctggtcttccgtcaggtcccggcggtaatattcgtggcagcccacgtaattcaggcatacgacgatgaggaacagcaggaaaagcttgatccaggtcatccaggggcgtctgaccttgcgggcgggagggaggggggattccgtggccgcggcggggttgtctggtgcttcgctcatagataaaaatgaaaaggggtgaaagggaaaaggcggggtagatcagtgcttccagcggcggtggtcaatgatgcggatggtgacggccagcgtcaagaccgtcatggtcaggtaaaagacgacagggcgcgtatcaaccagcccggcggaaaagcggtccagatgttccgagcaggacatgtagtggaaaatccccgctgcggggaattccccccataccacgggaataagccccatgaagaaaatcagcaccagcagaccgatggtgatgatgccggaaatgatctggctgcccgtcagggacgaggcgaaaatgccgatggccgtgaaccaggcgccgaccagcagcaggatggcgtacgccccggcccagtccgccaggcggtaggggaggaccatgcccgcatcatacccgtaaatccactgcacgatcaggttggaccagtccgccagaagggggtacagcagcatgggcagccacaggatgatgtaaaaggcgtatgcggagaaatatttgcccaggactacctgccatgtcttgatgggcgtggtcagcagggattccagcgttcctgtcttctcttcctccgccagggaacgcatggtaagcagcgggaaaatgaacaggaaataaaaccagaacatgggggaatgcaggatgaagaacaaaatgccttccttctgcggggccagctggaacgccttcagcgtgccggacagggaaacgctctgcagggccatgacgaaggccaggatgacccatccgtacggggtcatcacgtagcttctgagttcttttctgaaaatggtaagtaccggagacatggggagaaaaggaaaatgcggggtggtggatagagagggagaagaaacgggcggttaatctttacgggtcatttccacgaacacctcttccagggtgggggtgtggcggtaaatatggcgcagggggcagccctgttccgcaaggaggcgcgcggccttctcacgggtatccgttccggcctccgcgcgtacggtcagcgtatgccagccatcggcgtccgtgccttcatggatgaccttcttcacgtgttccaggctttccagcttctgcgtaatcagctccagatccccgcggaactccagcgtaatcttgccggcggcgcggaggttggctgtcaggttagagggggtatccgctgccttgatggtcccctggtcaatgatgatgaccttgttgcagatcatctccacctcactcagaatatgggtggaaagaataatggtgtggttggccgccagccccttgatcagctcgcgtatctggcgtatctggttagggtccaggccgttggtgggttcgtccagaatcagcaggtccggttcacccagcagggcgtccgccaggcccacgcgctgtcggtagcctttggaaagggtgcggatcatcttgcggcgcacggggtccaggccgcattgctccacgaccttggagacggcgggccatatttgcttggaagaaatgcctttaagcctggcgcggaacttcaggtactccgtcacgcgctggtcgtcgtaaagaggcacgtgctccggcaggtagcccaggtgcttgcgcgcctccagaggatttttaacgatgtcgaatcccgcaatcgtggcggtcccggaagtggggggcaggtagccggtcagcatgcgtaaagttgtggtcttgcctgcgccgttcggccccaggaaccctacgatttcccccttttcaatctggaaggaggcattctttaccgcttgaaagcggccaaactctttggaaagctggtcggcgtgaatcatggaatcaatgggaacagggtgattctaatccaaaccgctcccgtctcaagcttattctcccctgtgccgcggagacgccgccgccgcttgaaaagcaacacatgctgaaaaggaacagcggctgttccaacattactggggaagggctgccgggaaggaaaatcaatccttcaaatcctcctccagccgcaggacgatatcccgcacgcgcacgtcctcctccatgcgggaggcaaccagcttgttggcatggatcacggtgccgtggtcccggcctccaaaggcctggccgatatccttcagggagcattccgtcaggcggcggctcaggtacatggcaatctgccggggaaaggcgatgctgttggggcggcgcttgccggtcaggtcgctcaccttgagctcgtaaaaatccgccacgcgcttctggatggaatccacggtcaggatgcggctggtttcttcccgcaggatatcgcgcaaaagctgctcgatcttggcgatgtccggcatgtccccggacagggaggtaaaggtggctacgcggagcagggccccttccaggcggcgcacgctcttctggatgcggctggcgaggaactccagaatctcgtcagacacgttcatgccggcccggtcgcgcttgctgcgcaggatttccagccgggcgtcatcatccggaagattcaactccaccgtaaggccggactccaggcgtgccgccagacgggaatccaggttggaaatatcgcatgcggcggcatcggcgcaaatcacgatcgttttgtgggcgtggaatagctcgtcaaacgtatgcaggaactcttccaccgtcttctccttgccggaaataaattgcacgtcgtccaccagcaggacgtccgccttgcggtacttgcggcgcagcttggcgaagctctgcccgttctgggtgcgggacgcgtcaataaactcattggcgaactgttcgcccgtgacgtacaccacattcgcggaggaatcctggtgaagcacctcatggccgatggcctggagcaggtgcgttttccccacgccggacttcccgtacaggaaaaggggattgaacagggcccgttccgactgggcgatggacagccctgcctgataggcaaagcggctgtcttcataaactacgaacgaatcgaacgtgtacaaatcattcaggcatgcccgggttccctggctgcgctgtttctttgccgtggcggacggggaatccgccgcaggcgacgttttggagcgggaggaagccttttgtggttggccttcggcggccggcagggatgccacctcgtccgcgcagatgaacttcacctggcgctccgtgcccagggccagcatggcggcctgcttcagctccggcgtatagctgttctccacccagagggcggccatgggatcgtcacacaccagcgtcagcgtctttccggaatcctccaggagggaaaacttgggaaaccacaatccatacacctccggagacatgattgtttgcagggctcccgtgatcctggaccaggtggctgacaattctgatggtggcgtcattgttgtggaaataaaagatgttgctggttataaacggccgtgaggccttccgtctcgctacgaggccgcccgcggatggaaccggaatgggttcatccacagccgtgacagctcgtggcgtccatcgggatggagaaggcgaactcatccgctttcagctcgacaccccggtcgacggaagcgccaaagtactgatttgcgcctgaggaaaaaatatctttttgaagcagcgtgagtcatcgttccgcggctctacgttccacgggggttccacaccaaaaaatattttagtcttgcttcctccaataatttagtcctcctgagtatattctttgaatgacactataattattttattatcagtgaattactactttgttactggagtgtgtgacgaaaaggaaacaattacgccgccgtaaatcaagcacttacaggcaccggaccagaaagccccagagaggttccggaagagggctgccgggatggttgacaagaggcgccgggaaacctaacgtggctgcatcatggaacagatgggacaatccggggaaacatgttattccctctgccggggcaaatttttggagctcttgaaagcaggaaggtgggaatacgtgcgccgggtcaatgccaatggagccgtcatgatcgtggccgtgacggaggacggcgaattgctgctggtggaggaataccgggttcccctgcatgccctgaccatcggactgcctgcgggcatctccggagatgaaggggaggaaagcacattgcaatccgcccggcgtgagctggaagaagaaacggggtaccgggcggatgcctggacgtatctgttcacggggccttcctcccccggattgaccacggaaatggtatccttctacctggcggaagggctgcaccaaatatcggaaggcggcggggtggctcatgaaaacatcaccgtgcaccgcattcctcttccgctggtgcatggctggctgatggaccagacagggcagggaaaagtggtagacccgaaaatcttcatgggcctctatttcctgtcccgctctgtaaatggcgtgggactggaggaataaggacgccctgcgccgtaaacgtccggacgcatggagcggctttggccgcaggccgtatgaaacgattggggagaaagaacgattcatcatcaatgatttttctggatggaaaagcgggctgccgtcataaaatgctccggacccataaaaaaatctggacattctttccgatccgggctaaatatctccccgctttccagcaccaaccacttaacggcagggtagctcagtggtagagcagaggactcataagcctttggtcgggtgttcaaatcacctccctgctaccattttcataaaccccttaaatcattagatttaaggggtttattaatttggaaaatatacttgcatatgtttagacaaacaccaagattagtgggaaaggtgattttgaagagatatttcatcgattaaaccctccacattccaccagaactctaaagctttggaggggagccagtactggctgcaaggacttctaaaaaggggttgttatgaggatggcgaaattgtaagaaaaggcgggatgagacatagaaaatgataatactgtattagatggatattttgcttttttgaataaaacttgccggagaattatatgcgattatgtatctgtctttatggcacgagaactgctttcccatcctctggttgatgatattctccatttaattctttccgacgtactcaagtcattaccgcagtcaatgttgcgatgatttccacttactcggtgatcgggcgaagaactgggaatgaaaagttctagagtcaggaaggagactatcctacagtaggatgaatgctatgttccgacaacgacaagactgtaatgaaagggagtatgctaaaagagaataaacaaatttcggcttctaagtattacatttatctactagcacaggaagataaggccctgctattgggtacttaagagctataaatagtaacatcggttcattattcaataatagataaaatttttaactaatgaaaatataattcaattgttatatggaaatcatttatcattacccaccagagttgaatgcactcgtcattgaagttataccgaaactttgcaaaagcaaaaaagatttattgactttttttcgaggagcaggtgtgccttctcgatttttagaaatttatcaaagtcagttgattatagataaagatagttttaataaatatcatgttgcacgtgaggttgttgagatgctgaacaaagccggagaggcatgtttgagggaacgccgtgaaattttaaaaagaattacggaatttgatgatttttcagtttgttgggaaagtgatcagcaggcggcttatgggctggtcgcacgtatacgggacttgattaatcgcaaggactcttttactcgcataaatattgaaagggagcgagaacgtgaagcaagattacgtgaagaacagcgaaaaatagaagaaaagaagaagaaatcaaaagagttgcaaaagattcaacaaaaatttaaggctcttttttcttgaaaaaaatccatggaaaagaggaaaagaattagaaagtgttctgaatagtttttttgaatataatgatattcttctttctgaggcaattactatcaaaggagacgaacaacaaggaatcattgaacaaatagatggtgttattgaatataaaggaaaagtatatcttgtagaagcgaagtgggagagtgaaaccttaggtagagaaaaaatagcttctcatttagttcgtggttacaatagagggggatgtgaaggtggaatatttatttcgtattcttcttattctcctgctgctattgctgattgtaagaatgcattaggaacaaaagtttttgttcttttttctttagaagaaatatttaaatgcatacaaagagatgggaattttattccgattcttgatgaaaaaataaatagagctattatatataaacaacctatttaatttaacttatgttattcgcacaaagtttgtccatagccccggccttcatggcggtactgaatgtataggcattccacatcaacgttgtactgccatctgaatcctttgcattaacatcggcttctttctctatgataaccttgaccgcggagcaggggtgtttctttactgcttcgaaaagattgcgaatgcgtgtgcatactggggtatacggcgattttcctttattgagggcatgtctgacctgtgggtggaggagcggtgcccaagccatgctcttctgaaccatcgccatgatgtccggacagacgtgcgctttgttcatgcaaattcggaatagcctgggtacagggtaacatttcttgcggtgcgttctcagggaatcccaatcttgtgagggcgagagctgtgaggataaggtaggggctgttcatgatgaggtgtttgatgaagattaagagtcatggtttcccgttcagcccgatgaagtagggcggagcgggcgtattaaggtctccaatcagccagataaagggtcggtcgaagtgaatttccttgatttcttccaggggtatacagcgctcctctacaatagcactggttactgctgctgcgatggtttccttttcgttcgtgatgacgcggcagcgttgtacaacagcgctcaccataagcggcttgtctgaaaatcgtctgaaatcggcccggtcagaaaacatcgttgacagccccagttttttgagtggagccttcagggacacaatgccgctgtcgagatccatcttgggcaggaagacgagcactttttggtgtttggcttgggcgagggcctgtcgaatggcattgtacttctgcaccgtgagcgtttgggtaaaatcatgggcggaggccttgggcaggatgccgatgaagaaccccgcttcccccttgcgtccctgcgcatcgtagccgaaagcgaccgcttgccaatcttcaccctcggcatagcgaaattcggtttgctggagcatcatcggtacggtgcaggtcgtaccatcagcacagtggaagggtgctttttgtgttacgttgggttcaaagggacagagccacttttcgcgcagatagatggcgttgagtgctacgaggcgtgtattggtcgtgatgctcttatctgtaacaatgcccggaatcattccatgcgttttcttgcttgcccagtcgttaatggcctttaccgcttggcccggcgattgagcaaaggaaacgtggtggacgggaacagagactggcttgagggagaacccttgatcaacaaagagcgcatcggcagactgcacctgaatggcactgggaactccttgttttcctaaaagaagcttatccagggaggagtgcgtgtctcctgcggcaccttcgcgcagcaggagcaagaggcgttccagcgaagcgggggacaaggtgacgttgccctgctgcgtgcttgccatttcgcggaagaggtcaaaggcaaagacatctccgtgctttgaggagagggatacttgcaggaggggtgcaggtgtggagggctcttcaatggcagatgacgatggataactggcgagggcaatggaagcgaggatgagggataggactttcatcatgatagtattgctgtgacaggctcaaggtcagcgttatggaggaaaacatgcctcatggctcactgcaagacatgcgttccaccatcctgtttttatctaacaaaacgcgtcttcctgtaaaaccatttctacaataaggaattaaacgatgatgcttgcagcctcaaagagagttttcagcattaaccccgtggaggaggtttgagcatgggcattcccgggcacaagaatacctgcgtgctttcaacgaggaacgcctgaaaagctcgggggagaataaagggaatttttctttcctcaaaatgcttttacggagacgaaatcgcctcagaacataccccaatcttcctcacgcaagacaagcctctccattcctccttgagtgcgtcagaaggggaagttgatcttccatcatactcgtattccggagaaaggtggctcaaaacctgagtatgggagataacaagagagcccggttggactatctattttattatttcagcctgaggccgaagactccggatttgcgtccgctgagttccagggcgcgcaggcgttccggagggaggcagtcacgggagaattccgcgtagtgcatgcggtcccggaagtagtgaacggcgctctgggaaagggcgaagatgaattccatgcccatttcctccgcttttcttctggcgaattcgcatagcgtccggccatagccgcggccttcatggcggtgcttgatgtacaggcagcccagttccgcgctgcggtgtttcgggtagggatagacggcaacgcagcccacgatgctgtcgtccagggtcagcacgtagtagtcatccattctggcggcgatgtcttcatagttccggttgaccagcttggaatccaccacggagcgggcgatcatggagaggagctccggaatgtcctcctcctttaaggggcgtatttcccggtaggagtccgtgtggaccatggtgcctacgccttcttccgagaagagttcctccaccagtacgcctcgcatttttccgtccagcaggtgtacccgggggattcccgtccggcaggcctcagccgcctggtccagtagttcccggtgggttatttctccttccaatcccgccacttccgattccagaatggcggcaatggggcgtccgtcacgggagggaaccttatggtcgttgagcagggcgatgtacttggaggcccccaggctgaatgccatacggacggattccgggtcaaaggagccggaacggccggaggccaccacagggatctgatgcctccccaggatttcccggactctttcccggacaagctgaccgcctttcaacggcacttccaccagggcggagcgcatttcacaaacgcgcgtgtgttcgtacagcgcggaggcgtccgttccttccactatcagcactggcctgacgcctatttcctgaagagcgtccaggtccagcaatgcgtccaccagctcttcggaatccaccagggggcgttccacatgcacggcaaagattttgtccctgaagtacgggacgtactccagcacggaacggacgttggtggatttgttgggagggagcgtggtcaagggcggcccggaagcttgaagacggagggaacggctgtacccgtttcctccgtcctgtaagtgatgcgtagtgttttagaacgtgcgggtatcggcggaatcccggttgtccatggtttccgcgaagtcctgggagtcaagagtgacggcgatttcttcttcctcaccggcggcaggcgtttccgccggcgcctgggcggctccctccttgcggagcacgacgctgaccttgcgcctgggcatgaccagcttgggttccgccacagcgggctggtagccttccccaatggtggtggcgtcggaaatgacggctggagcttcttcctgttccggctgttgtgcggactggtgttcccgtgcacgggagacttgttcccgcagggcggagagcaggtcgctgggcatgccgtcaaaacctatttccggcaggttggcgccgtcttcctgattttcatcggaagaatcaaactggggcaggctggccaggaagtcttcaaacgcatccaggttggtggtgctcttgaagaggttgccaatggcttcccccttgatgctttccatcagggtaacgaacaggtcgtaggcttcagacttgtattccaccaggggatccttctggccctgggcgcggaggcgaacgccttcccgcagagagtccatgttgtacaggtgctcctgccacattttgtcaatagcccccaggatgatctggcgttccatgtggtccaggtattccggacgttcgcgggaagccttgtcttcataagtggccttgaccttgtcaatgaggaaggcgatggtgtcatccatctggcgttcttccagcttggcggcgtccgctgtcagtcccagtgggaaggaggagttcatccaggcgagcagttcgtccggatgagtcaggccttccgagtccggatccaggaattcatgggcgcgggtggcgattacttcttccaggatgtcgtaaatcatttcccgcgggttttccgtggaaagcacttcattccggtagccgtaaacgatttcacgctgcttgttcatgacgtcgtcatagtccagcacgtgcttgcgccacatgtagttgcgctgttccacgcgtttttgggcggattccacggatttgttcaggaagctgtgttccagggcttcgccgtcggctacgcccaggcgttccatcatcttcgtcatgcgttccgccgcgccgaagttgcgcatcaggtcgtcttcaaaggagatgaagaactgggaggcgccggggtctccctggcgggagcagcggccgcgcagctggcggtcaatgcggcgggattcatggcgttccgtacccaggacgaagaggccgccgaggtcggccacgccttcgccaagcttgatgtccgtaccgcggcccgccatgttggtggagacggtgacggctccgcgcttgccggccagcgccacgatttccgcttcgcgctggtggtttttagcattcagcacttcatgggggattttggccctcttgagcatgcgggagagcgtttcagaggcgtccacgctggccgtgccaatcaggatgggctggcctttatcatggagttcctgaattttgttgatcaccgcgttgaatttttcacggcgggatttgaagatgaggtcgttctggtccttgcggatgcaggggcggttggtcgggatggggaggacgtccagcttgtaaatgtcatggaattccgcagcttccgtttccgccgtgccggtcatgcccgccagttttttgtacaggcggaagtagttctggatagtgatggtcgcgtaggtctggttttcacgctccacttccacgccttccttggcttccacggcctggtgcagtccgtcgctccagcggcgccccggcatttcgcggcccgtgttctggtcaatgatgataaccttgccttccttgacgacgtattccacgtctttttcgtaaatgcagtaggctttcagcaactgggaggtggtgtgcaggcgtgctcccgtttcatcaagctgcttggtcagttcattcttgcggcgtagcttgtccttttccgtcatgcgggggtcttcatccatttccgcaaaggcggttcccaggtccggcagcacgaagtcctccgggtggccgggggagatgacttcacggcctttttccatcaggtcggcgtcgtgggtcttttcatccacggtgaagaacatttcctccttcagcttgtagagttcctttttgcgcgtatcctggtaaagggtcagttcatatttttccacgatgcggcgcagctcgggatcctgcatggcgcgcaggaaggcgcggtggcggggctggcctgtcttcaccttgaacaggcagcggcccacttcttccgtgcggccttcttcctgggctttcagggcctgcgacatgagctcgttgcaaaggtccgtctgcgctttcaccacgcgttcaatggcggggcgcagggtatcgtactgctgttcccgggtgacgaccgcgggaccggaaatgatgagaggcgtacgggcttcgtcgataaggatggagtccacttcgtccacaatggagaagtagtgcccgcgctgcacctgctcggatttggaggtcgccatgccgttgtcgcgcaggtagtcgaagccgaattcggcgttggtgccgtaagtgatgtcgcaggcgtattgctcccggcgaagctgggagggcatcatgctctggatgcagccgaccgtcagccccaggaactggaagagcatccccatccattcggagtcgcggcgcgccaggtagtcgttcacggtcaccacgtgcacgcccatgccggtcagcgcgttcaggtatacgggaagggtggcgacaagcgttttgccttcccccgtggccatttccgcaatgtagccgcggtgcagggcgatgccgcccagcagctgcacgtcaaagtggaccatgtcccacagttgtctttgtccgcagatatcgcgttcttccccgcagagcagccgggcgccgtgtttgacggcggcaaaggcttccggcaggatctggttcaggtagcgttcgcgcagcttgtcaaactggggggtgatgttattccaggcggccttcccctcttcaatggaggcgggagtggcttccaccgtggggagggcggcaaattcgtctttcagggattcaaagcgtgcgttcagcttggcggctatttcctccagctcttccctgggagcggcttccacaatgcgcacggggggaagctccatggggaggaagcggtgaagatagccctgccattccttcgttttttcaagcaggaaatcctgacccttgccgttccatgattcttcaatggagacgatttgttccacaatggggcgcagacggcgcacttcacgctggtttttggtaccgacaatcttggttagaatccacttaatcatctttgtcttgttgaaaattgacgaggtagagtcgctttcagcggtctaagaatcgaaaaatactagcggctgccggaagaattgcaagcacggccctccatttgctttgatgatgacgtaataggttggatttgggcggcatcattctgtcttccttccgtttttccttgcctctcccttttccctgtaggagtgtataggggaaaggagagaatgagcatgtacggagtattccattccgccgggctggccctttttctgccggctgtttgcatgatggccggttgccaggaaaatggcgccgtaaaacagcaggaagtgaatttgctgtccgaggggattgatgaggacggcaaccttttcatgcattttgaacttgattcccattaccacggggatttgtatgcggaagtttccatgaaggggaatgaaatgcgcattgctctgtatactcattccactcccggagcttcccggaaggtgccttatgcggacggttacaggcttgttgtcccatggcccgagggaacggattccgtggatattaccctgtgcggaataaatttgggagggtgggagaaacataaatagtaatggagggaggttccgttcagagacgtttttgttatctgaatgttaacggaaattcctgtgtggaggcgcttgtttgtggtatgaaggcggaatgaagcctcttttggggatgggatgtgcggtgctggccgtttgcgccgtcggcttttcagcgtaccgcatcctgatggagaagatgcccgatgaaattcggggaacgcgcctggtgatggaacatgacgcttcttacctgccgaaggcgggcatggtgcggctggaaaatgccggattttccagcatggttcacgggttggagaacggggggaagtttttctcactggcggagtgcatcgtggaggcgcggcaaaaggatattctggatgatatgctggatagggtagatccgcagcgttctttgcgtttccatgtgatttgcaacgcttccggcgcgatgaaggaaacatggctggacgatggagggaacggggaaaacgccgtcctcatcaaccgatgcatggccgttctgggagcctattggctcttgcgccgttattgtgatgatgaacagctgtttttcaaatggatgaggctttcgttgaggaacaggaaaacggcgtttctggatgattccgtggaatacctgtttccctggctcaggccggaccgggaacaatatgttcatggaaagtggatttcggatatcgaatccgtcacctattattgttatcctttggaagaaaggggaaagagttctcttccttccccattcatgtacgcggttacgagccggaaaaggttttcttccgtctccttggagattcgatgctccgcgttgaaaggagcattgatagacgtggagatcaaacaggacagccagatgattcgtgccggaagggccgtgctcatccggattgatgggaacgatcatggccggtcttattcatggaacaggcgccccggaaaaatgttgcccgtgcggctgccttccatggagattccggaaggcggtcctccggccatgatacttccggttccggaagacttccgttcctgtccggaggaggaaattttgcctgcattaattgaagaatgcccgtgcatgagcatgtaagccggcgcttgagcactaggcatgaaacgggaggcggcatgccattgcattccggctgcgtcatacatggaaagaggcagacgatcagttgggaaagaggataaacgtaaacttttttttggccggttttgttgtggaaccgtgtgatggcccatggttcatgacaggtacttctcttggaatgattccaaattgatgatataattaccctatgagtcattgtgaggatgggcgcatccgcatccgcggcgcccgtgagcataatttgcagaatgtggatgtggacattcccctggggcggctgacagtggtgacgggaccttccggatcggggaaaacgagtctggccatgcacacgctgtatgcggaagggcagaggcgttatatggaaaccttttccccgtacgtgcgccagttcatggaccgtatggacaagccggacgtggatgccgtggagaacattcttccggccatcgccctgcatcagcgcaactccgtcaggacgtcccgctccacggtgggaaccatgacagggctgaacgattactggaaattcgttttcgcccgtctggccgtggggatagatccggaaaccggacgggaaatcaagccggaaacacccggctccattgatgaaaagctgcatgaggaatttccttccggaacggaggtgatggtttgcctggaagtggcgcggcccgaatccgtggacctgcccacgctgaaaaggaacctggtggcgcaggggtatttgcgcgcctttgcgcatggagaggccctccggctggaggacgaggaatggaccctggaagacggggctcctttgctggtgattcaagaccgcgtgaggctggcggaagaccagcgggagcgcaggctggaagcgctggaaacggccatgcgcctgggtggcggcgtggcccatgtgattccccgcgtggacggcatctggctgcccgccatgaaattccgcggggactggcatccgctgatggagccgcggcccggattgttttccttcaattcccccctgggggcatgcccggagtgccgcggctatggccgcgtgatcaccattgactacaaccggtgcatcaagccggagctcagcgtcaatgacggggccatccatatttttgaaggggaaagcaaggtgttttccgaatgcaagaaggacctgatgcgcggctggcgcaaaaatgcccgcaaagttcgtctggatgtaccgtggaaggatttgaaacagtgggaacgggactggctgctgtacggggacggagaggatccggatgaaatgtatgaacaaggcctgtggtacggcattgcgggctttttcaggtacctggaaagccgcacgcataaaatgcatgtgcgggtgtacctgagccgtttccgcacctatcaggaatgcccctcctgccatggcttgcgcctgaggccggaagccctgcaattcaaggtgggcggcagaagcatgccggaactctccgggatgcccatggacgaactcctggcctgggtggatcaatacgtcacgccgcgcgcggatgaagaccccggcttgaagcatgccgtggcggaactcagaagccgcctggaatatctgaatgaagtgggtctcggctacttgacgtccgaccgtcccacgcgctccctttccggcggggagattgaacgcgtgagcttgacgacctgcctgggcgcttccctgacggatactctgtttgtgctggatgaacccaccgtagggctccacccccgcgacacttcccgtttgatttccgccatgaaccggcttaaaaagcgcgggaatacgctggtggtagtggagcatgaggaaacggtgatgcgtgccgcggacagcctggtggacatggggcccggctctggccgggaggggggaaaactggtttattccggagaacctgcccggattggggaagttgcggactccctgacgggggcgttcctttccggcaggcggcgcatcgcggtgcctaaaaagaggcgcaagccgcgtcaatttctgaccgtatccggcgccacgcgccacaacctgcacaagctggacgtgaaagtgcctctgggcgtcttcacctgcctgaccggcgtcagcgggtctggaaaaagcaccctggcgcacgacgtgctgtacctgaacgctctggtggaaaaaggggccgtatgcgaggatgaacccgcccatgtcaaatccatcaagggctgggaacaactggatgaagtggtgatggtggaccagagccccatcgtccggaccccgcgctccactcctgccgtttatgccggggtctttgaagaaatacgttccctcttctcggagacggaaacggcccgtgcgcgcggcatgaagcccggtttcttctccttcaacagcggcgacggccgctgtccgcgctgcatgggcatggggagtgaaaaggtggaaatgcaatttctttcagatatcttcgtgcagtgcccgctgtgccacggctcccggtacggaagtgaagtgctgagcgtgtaccgcgacggcaggaacattgcggacgtgctcggcatgacggtggcggccgcgctggaatacttcagagcggaaaaaggggccaaggcctcccgcattgcttccaagctgggcgtgcttcagcgcgtagggctggggcacctgaccctggggcagccgctgaacactctctccggcggggaaaaccagcggttgaagctggctaaaatcctgctggaccagattggatccggcgcgaacagccccaagatgctgattctggacgagccgggaacgggacttcactttgccgatattgaaattctgctggccgtgttccgggaactggtggagcaggggcacaccctgctggtcatcgagcacaacccggaattcatcaaatccgcggactacgtgatcgacctggggccggaaggcggcgcaggcggcggccatgtggtagccacgggaacgccggaggaaattgtagcctccgggaagggatatacgggcaaatacctccgggatgtgctggaagggcgcccttccgtttacgatccggcggacgccgctatgccggaatccgctgacgtggacataccggaaggcgtgatggccctgcggggagcgcgccaccataacctgaaaaacgtggacctggacgtgccgcgcggagaaatgaccgtgctgaccgggctctccggctccgggaaaagctccctggccttcgacatcttttttgcggaagggcagcggcgtttcatggacgtcatgtccccgtacgcccggcaattcacggaacaactggaaagccctgacattgaccgcttgaccggattgccccccacggtggccattgaacagaacatgtcccgcggcggcaccaaatccactgtgggcaccgtgacggaaatctggcaattcatgcgtctgctatatgccaagctggggcaggcctactgcccgcagtgcggcgtgccggtgggcaaaagatcggaatccgaagtggtggagctggtggtgcggcagctgaaaaaacacggcagtctggccttgctggctcccctcgtcaggggacgcaaggggcattacgcggacctggcccgctgggcggaaggaaagggatatgaggaaatgtgggtggatggcaaattggttccgttgagcggattccagccgctggaccgttattccagccatgacctggacctggtcgtttcacgtccggaggcctcctggaccccggaaaaacttgccggagcggtgcatgccgcgctggaaatgggggaaggtttcctgcaagtgcttccgcccggttccagccggccggagttgatggggaccaagcttgcgtgcgcctcctgcgggcaatctttcccggaactggaaccgtacacgttctccttcaactctccacgcgggtggtgccctgtgtgccgcgggcatggcatcgtgggcaagggaaagatgaaggaagaccaggcgcaatctctgctggaagccgaactgaaatatgacaaggaactggcgcggcaggcggacgatgacaaaggggtgaaaatctgccccgcctgccagggagtgcgtttgaatgaatttgcgcgcgccgtgcggcttcagggagtgactcccggtgaaatcgcctccctgcctgccgtagccgccgcggaactggtcaaaggatggaaatttgaacgggaggaagctctcattgcccgtgacgtggtggcggaaatcacgcagcgcctcaacttcctccagcgggtggggctgggctacctctccctggaccgcagcgccacgacgctttccggcggggaaacccagcgcatccgcctggcatcccagctgggctcccacctgcgcggcgtgctttacgtgctggatgaacccaccatcggcctgcatccgcgggacaacgaactgctgctgggtacactggatgaactcaagcgccggggcaacaccctgctggtcgtggaacatgatgaagacaccatgaagcgtgcggaccacattgtggacatggggccgggagccggcatccatggcggcaggattatggctcagggcacctttgaggaactggcagccatgccggactccgtcacgggcgcggccctgcatcataagccgcgccatccctaccgagggaaaaggcgcagggttccggccagaaaagatgaaaccgcgtggctgcgggtggagggctgccgcctgcacaacctgaaggacgtgaatgcggccattcccaaggggcggctgacggtgctcaccggcgtatccggcgcggggaaaacctccctgatgacgggaaccatccggctggcggcgcgccaggccatcggcgacaagctcactcgggaccagaaaaagctgtggaaaacctcctccgggtttgacacgctgcgcatggtgtacggcgtggaccaaagccccatcggcaagacgccccgttctacgcccgccacctatgtgggctttttggacgacatccggaccctgttcgcgcaaacggcggacgcccgcaggctgggctttgaccgtgggcgcttctccttcaacacagggcaaggcaactgtgaatcctgcaagggcacgggcatgcaaaagctggaaatggacttcctgcccccctgctatgtgccgtgcgaaacctgccgtggcaagcgttacaacgccgccaccctgaccgtgaggtacaaggggaaaaccattgcggacgtgctccagatggactttgcggaagcggcggaattctttgaaagccagccccgcatctcggaccccctcaaactgctggcggaaaccggcctgggctatctgaccttggggcaggcttccaacacgctttccggcggtgaagcccagcggctcaagctggtgacggagctcatcaaggggcggcgcgtcagccggaacgccctgatgaagggcaaggaactgcccggtgacctgtacctcattgaggaaccttccatcggcctgcatccgcgggacgtgagattgctcatcgacgtgctgcaccgcctggcggaccagggaaacacggtcatcgtcatcgaacacaacacggaaatcatggcggaggcggactacatcatcgacatgggccccggccccggtgaagccggaggaaccatcgtggcggaaggaaccccggagcagatagccaaaaagaactcccccacggcggaatacatccgccgggagctggaaccggacagcgtgtaacccgttaaaacaaaaaccttgtctttcaggaccgttccggaattactggaacggtcctttttatatggagagaaggaccagatggaggctgacggcggacgttggcctggtcacagggcgccgaaatgcttttaaaggaaaaatcagctattctgaaaatggcggaacggaattactgctggaaatgtcttaaaggaagtgcaaggctgtgttccgcataagcccttttattcctgcggcagtggttggcaaataccggagaggcaggcgggaacggatgtaaaggcatgaaagccattctttagaaaatctttgcactgcggtgaaacaacaagcaatgaatatggtggaaaaaatagtatttgaaccgttggtggactcccaccgggaggccgtcatccgtatcttcaaccattacgtgatgaacggaacggctgctttctcggatgcggaactgccggaatccttttatccccatattctggaacgcgtgaaaggttatccggcgtatgccgtggtggactgccggaccggggaagtagtgggcttctgcttcctgagtgcgtataagcctgtacccacattccgggaaacggccaccgtcacttacttcattgctccctcccatcttggccggggcattggccggatgtgcctgggccgtctggaagaggatgccgtgaagcagggcatccgccacatcattgcggaaatatcctctgaaaacgaacaaagcatgtcctttcacgctagccagggctttatccatgccgggcgcctgaaaaacatcggctttaaactgggccgcacctttgacatcatttacatgcagaaggaaatcaagtgatcagcgccggtaatgcagcgtgcaataagatgatgggaatttccgaaaatcctcttcctcacgctattctgatgagtcctctctgaaaagacaggatggcagcgcccttctcgtaggcatcgtaaagatttctctagttttgtaggcgtcttaccgccccagatgaccgcaggctaacttccttccagagtgctgctgctgtgaaagactgcgagaaattcgttaaccagtgcattcacagagcgcaagggaaacagatttgccggaaatagaagccggctcgttcgctgctgtcaaaccgaacactatccgtgttacaatgtactggcatttcctgcgtctgaaaacgacaatcgccaagcttggctgttaaactggtacggcatttgggaaatagtccaaaacaaaaacaggaatatttttcaaatgatcataaattcgttaaagtcttccaatatgttttcatatacatgtagattagttcaaatgagtacctaatgtccatcaaccaatccggaacagggtgtaagtgttttaacctttttttcagtaattgatgttgctgaaccgggactaacgctactctcaatccggtactggctcttcttgaatcagcatgatatctttcacgaggtatctctttctcattatcaggtatgaaagaaaacactcttcccccgagggaggtgactgataaaccagtatcggttgataaattgccggtatccgttttccagttgacgggattgcggccatgcaaacgatgagaatgataaaaatccgcacataactcccatacattgcccaacatgtcatgaaacccccatgcattgggttctttttgtcccacaggataggcccctgtattggcatcgtgaaaatccatccatgctactttctcaagattatcgggaagaacgatttccttgccgcaggaataggctaattcccactgtgcctccgtaggcagggaaaagcaatatccttccggaagaatcccctgttgtcgtgcaatctcggttaatcgatcacaaaaatccaggcattcatcataggatacctggcacatggggtaccgtgcgcccgttgtgatggtccatctgtcttccaattccggaatcgggatccatcccatcatcttttcccattcctcctgtgtgatttcgtacttccccagccagtagggataagtaatttccgtacgatgtccagattttgtaattgggtaacttccttttggaatgaaaatcaaggtgagcttgtgttccgaatggggaatatccatttttaacacatctccggcctgggcagattgaacattggctgtcgcagggggtactatgtccaggcatgtaatatcattgccaggataaaggacaaagatgagcaaagccaataatgctataatagagaaactgattttcttattattttttatccattttattataaatttcattccgaagagacaggataattttaattattttttaatttagcctccagtaattgcttggctgtttttctgtcagtatttttcaaattctggttagctccttgtttaatcagaaaattgtaggcacttatttgtcctgtacgagcagcataatgtaaggcagtttctttgtagggaaaggtcatagagggtagcttcatttcatttgaagcaacattaatatcagcccctaattcgagtaatttcttcatggtatcaatatccccgatagctgccgctaacataagggctgcttcgcttccattccattttttatcatacggattaagatttggttgtggagtcatgtttgacgacaaatcccagtatgattgtaatgaatttctaatcatatcttttcctacaatgtaggcaggagtattgtaatgtagataataaggtggaatatagggatttcttgtttcttcttttttgggggttatggatgtacaagatcctaataagtttaatgctaaaaaaatcgaaaggaatataatattagttttcatgttaaataatttatgatatacttgtagtttttaaagttcatgtggatgatttttatgaaaaaaacaagaatcatgcatagattttttgttatatttaaaataggtaaataatattttatgatttgtaaacagcttttacagaatgatatttctttaattttcatttaacacaacaagcaaatttggataactcttctgccttcaataaagaatcattgggattaaaaatatgtatcggaattacataacttggatgcactttataaatatcaggcgtggctcttccctcaagatattgggaacctaatatcatacatcctatactccatcctagaattttcaattcatcatcaagaaaaaagtaaccaactgcatcataattacccattccctctgcttgagaccatgttgagaagagggggatgtcgtatatatattttactttttctttatctttttcactaaaaaaccaattaattttatcaaatttaaccttattcattaggtatggcgttcctttctttaagtcatcgcggatttcatcaatatttttcattttagaaagatattgattcatggatgtgcttttcttacgaaaaatgcttaataagctatgtaaatcttttggtttcttatcaactgttttttcaaaaacttctggggttatgtcggatggatttacgctatatttgatataaagacaggtataaaccaacggaagaggaaaaaatatgaataatgtaattataaatatactaactccaaccagaaattttactattcccaatttattgttcattttttttattttcatagaaaactagcataattaaattatgagaaatgcgtaatttattcatcatttaaataatccgctggctatattccaaaaattcgaattattagaagggatataaacagcgccatggttgtcgccaaagtcattcgtaaaatcatgagttattacatttgctggcacattttcgggatgatctgggccattctctcccagagccacattgaattcagaaagtggataaacgaattctaaaatatcatcttctttgctgattgctaaatgaatagaatcagcattagcaggagctttttcaaattcttctcctggttccagagactcattgtcaactgcaggattggccaagaaaacattgcctatattgccgatatcttccccatgagccaatgcttcaagagctactccagctcctaagctatgagttccgatatgtacttttatgttaggacatttggcttttaaatctctaagaaaatgagaaaatgcacctgatcctgtaaatctagaaccttttaccgcgtctttaaagtttgaagcaccaggattcccgttccacgcaaacccataaacatcgcattttccttccgaactcttataagctttttcaaccacttcaaatcttgtcatcgcttctgctagagtagtattataaccatggatccatactaacacacatccgcattttggacaatgacctattgttccttcataggcatctgacaaatttgaaggaaaaaccagtccatcatgatatatgtattttacagattcagtagcattaattaatatatatagaccaagataatcaagttgtttaaaaattctatttttgataaatccatataagtttcgtcctccgtattcccgaataagatccctgttaatccacctgccatctgtaggattcaggtagcggtaattgtagtagatcaggccaagctcgtcgtccatgaactcgcaggaaaacctgaacttgttttcctgagccctgtcgccctgcgccgtgattagggctccaagggaggcatattcatagcgcgcccttcgcgtctgcttacagtcgaagatggaagtgacgtttttgagcatatcatgcatgaagtaaagatgctcgttgacacttgttccatcctccttccagttggtcatcatcaggatgcgcgtagcagtcgattctgtaggatcccacagataggtcttcacaagtctgtaagaaggacgcatcaaatccagttcagctatttgcaaatagccctggtatagataccatgcatggctgacagttgaaccattaactgctacttttttctcaaagcggcgtccctggtaatcgtaggagcaagtaatcacggttcttccgtcttcttgagtaaaataacacagggcggtcattggcatcatagctcactttccaaatgcctgtcgaggtcttgatcctggtctgattaccgtctgcatcgtaagtgggaatgaatggttccgtatttctggtaatgtccgtgtactggttgagccggttggcattgtaggatacttcttcctccagttcccgtgcagtcttgcggttgccgatgttgtcgtaccggtagctgtagctgcctctctccctgagttgatctccagtcaattcactgcggctattgtaggtaaaatctcttagcgtggcaggagtggttccatcccaggagtcccggcgttgaactggacgcgtcagggcatcatactggtattcatggccggcggccatgcctccatttccctgcttctcatagccaatggaagccacgaggttgagcttgggatggtagatagatgttgctgcgaaccatgccgttggggtaggtgagccggttgaggaagccgctggtttcatcgtattcccaagtgaaggaagaggccaaaccatccagattcatcccaatcatgccacctttccgatcgtagtcaagatgggagtgctgcaccgtgcgggttccggtcatgaggcggtagccggtggaacgtccgaacgtgtcgaagtcttcctgaaggctgctttctaccgttccaaaggaagtgtcccgaaccattctgccgtaactgtcatgggaaagttcccggaggccggaggcgtcccggataaaagtcatctgcccgagatgattgtaggagaactcccatcccggagtatcgtcgctgtgggagacggagacaagttctcctgtcaatggagcataggcgtacgtcgtgacaatgcctctggccttggtgacggtttccggacggttgaactggtcgtaggttctgagaacgcaggagccgtcggcataggttttcttcagttccattcccgtggcctcgtcgtagagccaggtggtagtgtccccgtcggcgcggccggaaggatcagtgatgatgtccccttcgtccaccctgaaagtagtcagtgagaccatacgatcggcttcatcgtaggcgaaactggccggctggagggacgtgccgtattcggctatctttcttccctggatgtcgtaggaatagcaagtagtacctcccatggaatcggtgatggaagccacagcatcgcagcagggcaggtagctggtggtggttacgttgccggctgcatccgtggatttgactggtcgtccgtctaagtcagtttcaatcgttgtggcattgccccgggcatccgtctgatgcagaatcatgcctgtagaggtataggagcgttcctgcgaggaatgaatgcccgcatggttcgtctggctcactgtaaaaccatcaatgaccagggccaccttggattcctccggcttttccaggttaatcacgccggattctatcatttcattgtacaagtcgttcccttcacgggtgcgttccccccctcccgcgccgccgaaggcgccgattttgcgaaagggcagatgaggtcgattactttgatgcccgtttccagcacttccgtgctggtggattgctcgtccagcggcggagcgctgcggtgaatgcttttcatgccggagcaggagagcgcgccgcgttcgtccacggcttcacccagcacattgaagatgctataatcatgaaaataagagaaagagtgcaagctataatatttactcaaattttgattttcttcatcatataataaaatacttataaaaaatataatatatttaaaataaataataaaattaatataagcaatgatgttcggttataccatgcgtctgaacccggctccgtggagagttccagatccttggtggggatggaaagggagatggaggagtgggcgtgaaggtggagaaaacaggtggcgggagccatgaccttgaggtatccggactattcgtgccgggtgttgttggaagcagttcgtttggggataaggacgggagcggagagtccgttgaccaggaagttgccctggggctgtccgttggggtacatgggaatgaagggatagacggtgtccatggcgccgatattgaaagtgttgttcatggtaatgaaatgatgtttgttcaatggttgcgactaccatgaatcaaaaaccagcaacgtaaacacgtcgggaacgttatgatatttggtgagtttttgaggcggatggcaacgtgggaaaagggaggggattcttctccggtggcacgtatttctttgccatattttcaaaatttacccattgccagcttaaaaggcagcgtgctagcgtccatcaatgaattcgttcaacatctaactccattatttcatgagcaccacattgaaaaagatctatgtcaacgggttccccagtctctacgggggcgcgggaaccgaactccaccaccagattctggtctggctccacatgggtattgacgtgcatatcatccccaccaacggcggatttgaaaatgaagccctttatttggaaatgatccgtctgggcgtccatatccacgctcccaatgactggacagtcctgcaggaaggggatgccatcatcggattttgcaacggagaatttctggaaaacatgcccgccattcgccagcgcaccaaacgcaccatctttgtcaactgcatgacctggcttttcaacaaggaaaaggaactcatgaagcaggggctcattgccatgttcctttaccagaacgaggaagtcaggcagaagaacatgcccctgctcaagcgctgcaacgacgaccctaccattgctttcatgacgttcaagccttacttccacaacgaatccttccctttcattgaggagaggacgcaggaatacttcggctgcgggcgcatctcgcgccaggacgcggacaaatttgcggccaatacgctccatatttatgaatatttcgtggcgcctgtcttcaagcgtggcctttttctggggtttgaccagaggagccgggagaaaatcggagagccttacagttggatacgcacggcccgcgaccagagggaggtgagccagcaggacttttacaagcactgccaaatcgtgctccaaccgacggacacgacggagaactggccgcgtgtcggttttgaatccatggccagcggaagcgtgcttgtggtggacaaccgtggaggctggaggcagatggtggagcatggcaagaccggatggctgtgcgaccatgaaagggattttatctactacgccagcaagatggcctacgaacccaacctgaggtccgacatggcccacgcggcgcgggagcgtggactggagcttggagggctggaagcgtctgtagccagctgggaggaagtctttgacgcggtggaaaaactgccggcttagaaatgggaggaaaaaccatgaaaaagaaaacaaatattgtcgtaggcatttgttcatgccatggaacgggagataaacggaaagcggtaaggtctacctggctggcccatcccgcgcagaacgttgaatgcatgttctttgtaggaggaaaccgggttccggagggggaagaagaagatacggtggggcttgatgcgcccgatggctacaacgagctccccgcaaaagtgaaatccttctttcgttacgcgctggagaattacgaatttgaatggctctttaaatgtgatgacgatacgtatttggaattgagccggttgacctccttgatagatgaagattatgatctgattggggatgcgatggttgcgcttcgcaattcaccgagcggaggggcgggctacctgctgaagcgcagcatggtggaaaagctggtgaatgcgccgggttttgcggaatgcggggcagaggatgtgatcgtaggtgaactggcaggcaggctcgaaggccgcttgaaatccacgaaacggctttacatgtccaatgtttattacccggaacgggataatgacatggtaacggcccactggtgttctcccgacatcatgcaggccctgtattcgtttaattacaaaattccctccgctgtgtgcgatgttgttcatcttcattggaaaggggaaatgctgttttattccaacggggcgttcaggagacgggatacttcctgctatggctggtggagcattggctccaagggtgaactgaagctgagatggcagatgtggcctatggagcagctccttttggagggagaacggtttatcggatctgaaacggagatattccagcggccggacatgccgtccctggcccggttatgggctgaacgccgcctttcttccggcaacgtggaaatcatggaccaatctcctctgctgtatatccatttggggtgcggcacccggaggttgaatggctggttgaatctggacgctcccaattatgatattaccaggccgctcccgtggaaggacgattccgtagacgctttttatctggagcatgtcattggaacagtaacgcctgcagaggcctgccgatttttcacggaagccttccgtgctctaaaacccggaggaatcttacgattaagtttccgggacgtgcgcctgatgcgcggggtgatgacgcccgcgttcaggcaatacatgaagaaacaggggaaaggaaatcacactccggagaatgatttgtgtgcatttatggaagtctacaagcaacaatccctgtggtctgccgatttcctgagttatgttttggaagagctggggttccaggtttcccagcatgctccgggtaattcccgccatttgcaccttcagtgtcttgaaaggcgatccgacagggatgaacatccttttgacctgctgggcacggtttgcctggatgcccggaaaccgcagaagactgttaccggtaaatttttatccttgcgtcccgcttctgttccggcatctcccggttacgtcacgacgcagtttatgcccggctcgcgtacgtgcaatcatctgttccagatagctgctgcctatgcgcatgctctccggctgggtgtgggatgccgtattccctggagatacagttccgagacctgggagctgatgacttatctgggtgaggcctgttcgctgtgcccggacggcggttataacgatcccgtgacatacagggaacccggattttcctaccatcccattcctgaaacggttcgctacggcgccttgagagggtatttccagagtgagcggtatttcaaggatgttgcggaagaaatccgttccctgtttgctcctcttattgctcccgtccaggagggcgtggccggcgttcatataaggatgggggactatcttgaccgtacagacatgtaccatacgccggatgttccctttcttaatgaagctttacggaggctttccggcaacatcagtaagctggtcgtcttttccgattctccggaattggcccggaaattgatggagggcgttccggaagcaacgcgttttgaaatagtcatggatgagcatgggacgctggacgccctccgggaattgacgtccatgcaggaactcgtcctttcctgttcctccttttcctggtggggggcatggcttggagaccagcagagggtttttattcaaaaacagtggtttaccggaaagattgaggacgagcaggacattttctgcccgcaatggattaaactttaacaggtacattttatgaaatgtgttttgattgtgtcttctggggaaaagtcggagggagcttcggaattgcaccggatgggttatgagctggagctctatccctctaccgcggatctttcccccctcagggatgcgcgggaagaggaaagtgcatcctacctgggacggtccccggcgtctgcggaacgttcgcacgtccgttctctgagggcatctttcatacgtctgctggaggacagaaattatgctgggagtgacctgattattttcggagaaagcgatgccgtgccgatggtggcttcttcccgcttggaaacggctctcaggaaggaaatgaaggagcatccggagacggatattttccggctgttccatcatgcagtatggtctccgcaaggggctccgggggaatctgatgaaatcttgtttgaagatttcaaaacgggaaagacggatgccaatacctcctacgtatggggaacgcatgctctcgtcatccctgctgcccgacgccccagggtggcccgggtttttgccgattaccggttgccgactgatattgccctggaggctgccaacagccatggagacctcaaaatccgtgtggcccgccacaatctgttttaccagcacgaacggactaagcagagacccgattgcaaaattgctgtttgtctctcatcctataagcgtctgacggatttgcagaggcagatttggtgcatgatggatcagagctatccgaatcttcatgtgttcgcagctgtcaaggggataccggaaggcacgtaccgcagaacagtgctccctctctttgaacattttattcacgaaggccgtttgacgatgcggcttttccccaacaagaaccagctatccaatttcttggacacgataagggatttgaacgtttccgattacgatcttttcgccaaaattgacgacgatgatttgtacggaagggattatttcaagtcagtcaataaattccatctgcatcttccgccggaattcagcagcttttattgcgggccgggcgaatatctaagcgtgcgtggagggtatcccttctccggaaacggatttttcggctgctttggccccaccttggtattgagccgggatgtgctggaaaaattaataatttgtgagaccaatcctcacatgatatcccagatctcgcccaggctccgtcatgccgggtatggatttacggaagacaacttcatgcacatgatgatgctggataccggaagcagcaaccgcacccggtatgtacaggaaatggccctgccaatgcatctggcgattcagaccggcaatgcttccgtgatgcgcggagggctggttccgggagatttccggggcagaaactggaacatttctacgaatcaggttaatgaggagcgtctcatggaagtgcatcatccgcaatggcatgatattgtccgtgtctttgggaacagggcgcgccgttttgaacgggacgacgaagcggacgtcctctccgtcactgatgagaaaataactctcaagtgggattgctggggcgtggaggcgtttaaaaagatggaggatggaaccttctatttgtcgagcggcggcagacaggaggaacctttttctccccggaaaaaagtggctgtcctgtttatagccacggggcgttatatgacgttctgggaggagttttatgcggcctccaaacaatatttcctgacagggcatgatgtgcattattttctgttcacggatcatccggaagtggaaaccggcgatgacgtgactcttgtccgcaagccgttttatccgtggcccatggaaaccttgagaaggtttgagacttttttaaccgttcgggaggaattgcagcaatatgactacatttatttcatgaatggaactttgcttcccgtagggcctgtcggtcaggaaattttcccgatgaaccggcagggtctcatggtgacgcttcatccggggtactaccaacgcccccgttccacttacccctacgaaaaaaatggaatgtcccgggcgcgggtgctccattccgaaggagaatattatgtcgccggaggctttaacgggggaagggctgaagactatctccgcatgtgccgggagttggcggatgccgtcaggcgggatcttgaggacggtgtcattgccgtttggcacgatgaaagccacctcaataaatatgtgattggccggcatccccttgttttatctcctgaatatttattccctgaaacattggactttaatcaaaaaaatctcatggcgatcaaaccgaaagtaaaaatgatcgtaaaggataaatctcttcaaaaacacggaggtcacgcatggttgaggcaacagatataaattcccggcaggtcaaacgtgccgcttttgcggacttctggccgggatttgatccacatgataatattctgtccgcggttttgacggaaagactgggcatgaccgttgtggatgaccaggatcaggcggattttttaatctactccgtttttggagaaaaacatcagaactttaaggggattcgagttttttatacgggggaatccgtcaaaccgcgttgggatgagtgcgattatgccatttcattcatgaagggagatattccttatcccgaatgtcatttgaggatgccctgctggatgaacaatggccctgtcagaagaacgggaaaaatagaacaatactccaaagacagaaaatcccttctgtccaggcatacccgattttgcagctttgtgtattccaatgggaatgctccggaaagaattcatttcctgcgcctgctttcccggtacaagcatgtagattgcggcgggatggtcatgaacaacatgggctcctgcgttcgggataaaatagctttctgctcctcctgcaaattcacgattgcctttgaaaactatccggctgctggttacgtgactgaaaaactgtttgattctcttgccgctctttcccttcccatttattggggagcccccgatgcagggatggaggccaatccatcccggttcgtcaatgccgcggacttttccaccccggaggccctggctgaatatgtgattcgtcttgatcaggatgaagacctttacctcagttatatggacggtcccgtttttgtaccgggccagccggacatcggagaatatatgaaccgtctggcagaattcttttccatgatttcatgcagcgggaatatatgccggactggcaggccgcgtacggaggcttgccgtctgcatcacggctatcccgtcatgtcccgtcatgatgacggaaaacaatggacgggaaaggcggaacttctgctgccccaatcgctggcggcaactccgtttcccgtgttctgtccggaagggaaggacacggcttcccaattcatccgcaagctggccattattccggctaaaaaacattcggagcgctgtccggataaaaacaggcgcttgttgaatggaaggcccctgttcctgtattccgtttcctatgccctccaggaaggatttgttccggttgtcagtacggacagtgaagaagttctggaacgctgccgtcgggaaggcatccggtgcttccgggagacggtggacgaccgccgaatggaaaattgcgtacgccaggtattgacccgtttctcctgtgacatattcgccgtacttcagccgacttctcccttccgtcgtcggggcctgttgcgccaaatggcggaagacatggaaaaagggaaaattcaatccgcctacacggcccgcaaaaccaaaatgattggtcacatggagggacatttccatctggcgcatcgggaacaggacgccaagaaatttttctatttttttgacggaaatattaatgttgttacccggaaaaaatttctggaatcgggtacgatgtttgatgacggctcctgcccttacccgaatgattttccctgttgtctgcaaattgatacggaagaagagtggaaagccttgtcacggttaggtgaatttaaagactggcaatgttttctggcttcagaagggcataaaaaacgcatttgcatcgtctcaaataaacgtgatttgaaacgcaactattcctcttttgtcgactcttgcgacaaagtaatgagaatcagcaaaatggataacttgaattccggtctggcgggaaaaaggacggatattgttcttgtttcctgcttcgccggatacctggctttttcccctgaggaaaggcatatggaaattttacgcggagtcccggaaatttacttcaacaatgaagaattgggctattccaatgaatttgcttgtagggaagggctggaaaactggaaattcatgccgggggaagttcaccgcagcacgggcaattttaccacgttgagcaaggcgctttgtctggcggactatttattccctgaagcccagctttactatttgggagatacggatatgaacctgagggctgcgggttcttcaaagcatcatgcgccaacggaaaatgcctacatgcagtccctcattgacagcggaagagtcattcccattctggaagatgccgccggtgaatttcattactccgccccggcgccgccggtttcttcccaggggaatgttcccgcaccggacttgcttcctgtggacaccattctcatcagccatcctcagtggacagaccaatttcagatgaatgaaaaacggggacgccggcttcaccgcaatgaccacgcaaccatacttcaacatgatgaaaacaaactcgttcttaaatgggataactgggggactgaagaatttctgaggatggaagagggtaaatatcagtaccttgactatcattattcttctaccatcaatgaagtgaacaaatacgcgcgggaattgctcatcaacccgtatgacggctataactccgtgttccggcattccagccgtccttttatcggcatgaggtatcatcaatgggaggggttgctgctgctggaacgcatgtatcgtgatgttgaaaaaggaatacgaaagatgccccggcttcaatccgtcctgctgatggggatttgcaaggatgcgtttgcagcccttattctggcgcagcgattgaaaaaggatttcccgcatcttcatattggcgtgtggggatgcccatggccggtggatttaagtggacagtctcctgtataccggggaataaaagtttccccatctcatgaacagataaggaaaaaaagaccgtttaaaaatcttttggagcgttatggagatccactcaaactgcttcagcagccggaatcctccggactttgtttgtttgctttttacagtaccagtcaacattggactcttgatgaagaagcgacgaacagattggctccttaccttctgaaaacatatgcctatcaggctggcagcaaggaacatcatactgttgttcacggaaaaatcgtacatctggtaaaggaaaagccggcattggttcaatcctggattgaagaaatgttccggatgatggaaacggaaagcgggaaccatggggaggtgagaaatctgcgtatatccgcctaggcgtttcgcaaaatccctcaataatgaaaaatccctaatcaaaaaatggaatgccaatcacaaaaaacaaaattggccgaaaacatgaaacggataggttttctccgtattctcaatgaagaaaacgcagttatcccatgtttgttgagcgtagctcccgttctggaccacgttgtggtgctctgggcggatatggatgaccgcagcattgacctggtcaaggaatgggaacatcacctttgccacgcttgtcaatgccgggtcagctttcttcattatccgcatcatgtcgttcctcctcattccgtggatgacttgaggagccttccccgggaaaacagaattgacacctacttgaatttcggcatggaattcattcgccgtctttatgaagggcagctgttttgcgtttctaaaatagacgctgaccaaatttattttacccgggaactggaagcggcctttcaaatgatatccggtccggaggattgcgtctccatccgggggcacaataccctggttcatcagcaaagattgatgatttatggtcctcggcctgtaaatggcggtggcgactccctcatctgcggcatgaacaacttgccccgctttggaattgcggcgccttacgaagtggatataaccgctcatccgcaggtgaccccttatcctgatgcctgctggatgcacttcatgaaaacggctaaatacaaaaatgtcatccgggaatttcatgacgatgaagtcatccctctttcccaaaagccggctctgcaggagtgctttctctctcgtattctgccgttattgcaggaggcaaaaagcccgtatgcgcatctccgcctggactagttccgtttgatgccggttggacaggaaatcgcatgttttctcggaaaaactcttatctcacgtcactcggatggactctcccgtttgcatagcttttaccgactttgaatccgggttcaaaccgcaaaaccacattctgggcctgatcttgaaagaacgtttgggcgctgtttttgtggatgacctggcccgtgccgacttgctgatttattcaatctttggaaatgccgcacgttcctttaaaggtcctcgtctgttttatacggaagaacctgttttgccgcgctggaaggaaggatgctattccctgacaagcctgagagatggaacgctttccggggaccgtcattttcgttttcctgcgtggttaaacgccgactatatccgcaggacgggtcacattgaacaatactcctccgttccaggggatattctcaaccggcatgaaaaattctgtaatttcgtctattccggggagaaattccgggaggccatccgttttttggaaactctttcccaatacaaatacgtagacagttccggccagcttctgaacaacacgggcatgatcgttaaagacaaagtcgaattctgctcccggtacaaattcaccatagcgtttgaaaactatgcttcccccggttacataacgcaaaaactgacggatgcttttgctgccggaagcctgcccgtctactggggagcaccggatgcctgccgcgaattcaaccccgggcggttcatcaatgctcgtgattttcgcaatcatgcggaactggtccggtatgtggagcacctggacaggaatgttgacgaatacctctcctacttcaagggccccttgtttgacgagggacagatcggcgtggatggcctgctggatgaagcagccttgtttttcaagaaaattttcagggagggaaatgccgggcggcagcctgcctccatggagggaaaggacgaaccgttgcttcacgggggagtttttatgccgcggtatgacgatgggaaaccatggacggtttcggaaacagtttctccttctcagaaacggccacttggacggccattcaatatggcggcatgcattgcatcatacaagcgggtggaagacctccttcgccagattctctgcatgatgaaccagagctatccacatctgcatgtatttgcagcagttaagggagtttcggctgaaacggcccgcaggattctgcttccccatgtgcagccgttcatcgatgccggaagagtgacgctgcgcctctgccctaacagaaaccagcttaccaactttatggataccgtccgtggcctggatatttcatcctatgacctttttgccaagattgacgatgatgacttctatgacccggactacttccggcatgttgccgattttcatgccttgttgcccgatggttattcaagctgccaccgtggggagggcctgtggctgaaacggcatgaaggatacccttatctggaaaagtccttcctgctggccctggggccggctcaaatcatgtcacggcgggtcatggaggatctgctggcttgggaaaccgaccgcgcggctatgaaggaagccatgtaccgttgtttaaggcaaacgggattctatcaatttggctttgcggaagaccagctattccagaccgtcatgctggaacacgggtgtgctgacatagctccctatctgaaaaagcggggaattcacagccatctgattatgcaaaaaagcaatgcttccatcatgcggggaggtactgtttccgaggaattccggaaaatgcagaacggtgcttctacagatgccgggaatgatgaacacctcgtggacatcatccattctgactggaaaggatgcatgaaaatcagcaatggacgggccattcgcctggacggccctcgggatgaagccgacgtgctgtctctgaccggagtggaaatcacattgaaatgggataaatggggcgtggaaacctttacgaaaatggaagaaggcgcctaccgtttacggaagaaggaagaagccgccttccttcaatctcctccccatgcctcctcccttattcatttgcgccagcaggattggacggatggcttgtgcatcacgggaaacaggggaaagcgtttaaattgcaacgatggaggcgaaatccttgaatactcggacaaaaaactcgtcataggctgggattactggggaaaggaaacctttcttcgcagagaagacggtaattactggttctcttcctattcattcatggcgccggactcttctattgcggatgaatatgtcattgctctctgcggcgccccggaaaaaccgtggctgcattcaacggggcgtcccgtcattcgtatccgttattcttcctggaacctggaagaccatttggacaacatgaaacgggatatccttgaatttctcgccgccaccccgcatgcgaagcgcattctcctggcagggagggcggaagaagccgttgcctgccttcttctcgcttcatgcattaaaaaacgctatccttccgtccggaccggaattctcggaatgccgtggaatgtcggcccggaaagccggcatacagaggaaaactgtcctcaagaaaaacgtctccgggtcaatccgtcgttgctgcttaaggaaaaccgggcgcaaggaatcgatacttgcgcgtacgctttccatgtaagcaacagtaacccggaacaagtggaaaacaatctccggaatctccttgattctctccagatcatttacaatttctcgcccccctgcggttggggggaaaaagatgaatgcaagggtgcaaaaaacttcattcagcaatatccggaaatattcaagcgcatggcggattgctgttttgacgacttgaaaggaaaatccgccccaccggaatatatcgatctgaacgcatggatcatggaagatagataaaaattagagttatttacttgttactaagtatataggtcccttttgaaaagatgtacaggagattcatgccacagcacagaacactacagcctggaaacgaaaaaccttgagaaaccgagggttttactcatcttaaaatctgaaaactggcggagagagtgggattcgaacccacggtgggttgccccacggcggttttcaagaccgctgcattaaaccgctctgccatctctccatgcaacaagcgcgggcataagctaccgtgaggagggcggttctgtaaagtcctattcacgtctgcccgcaggtttgtggagatggcatgagtgcctgtgcttcatgaaattttgtgctgccggtggagatgttttatccctgaccagcaggggaatgcggagaccggtagtgcattttacgccgggaatcaaggggaatttgggttgggtattactctcaggggctgtataatgccgggcatgaaaggctcccgcattcttgtcctgaccgggcccggcaagggaaagacgacttccgccttcggcatggccctgcgcgcgttggggcatggcgggaaagtggccgtaattcagtttatcaagcacgacggttcctatggggaggtggtggctctccggcagtttccgaatgcggaggtggtctgttccggggccggatttacgggccgcgccagggatgaagagtcccgtgaacgccacgcttccgccgcccgtgacggctggcggctggcccggcagaggctggaggacgaatccttgaaaaccgtgattctggacgagattttttaccccctgaattacggtttcatttccgttgtggaagtcgtggatgctttgaaaaaaattacccccggaaaggtcgttgtcctgacaggccgggatgctccggaggaaatgatcgccgtggccgataccgtgagccggattgaatgtgtcaggcatgcctttcagcagggaatcaaggctcagaggaatgttgagttttaagatattctcttctgaaaactctcaggtaaacctgttctccgccgtaggccattcctctcttcattcctgcgtcgccctgaattccggtggaagctgttccatgagtttctgggcgcattcccggggcgtcgcttccgatgtgtctatggagaagtcatgcgggaaattctggtgaatgcttccgtattggcgctccgcatgggccgggtccggagtccggtcggtacggttccgctcgcgttccagcaggatgtcctcccggcagtccactttgatgagggcgcggggaatgccgctcaggcggttcaggaggtcttgaacccaggcgcgggattcgccgatgacgtggtccacgatgaccagggcgcctttccgcgcggcctccgcaatggcggcgtggaaggactcgatgaaggggagcccggtttcccggacggcgtccagggcgttttcatgccttccccggctcatggccagataatcgtccatggagaagatcatggcattccccttcatcaggcgctgcatggaccgggccagcgtgctctttcccgcgctggaggctccgttgagcaggatgacgcgccccagccccggctgaggctcctgcgggtggtccggggtttccgttccccagtacaggtggatgtagccggccttcacgttcccatccgccactccttcccggctcttgtttccattcttgtccgtcactgtgtaaaggggcgggtagggccggttcagttcaattcgggaccaatgggattcatggccgcggatgcgggtgaaaggcagcccgaacggggctcccgtttccatcatggcttcccggtatcccagggaacggagtttttcccccatccgcgccgtcccgtcaatgactccgcacatgttcctgcttgtcccgtccggaagcgccagttccttgcataggtacatgtaaccgccgcattcggcaaagatttcccctccgttccgggcaaattccaggatggccttccgcatggcctcattgctttccaggcggcttgcgaaggtttccggatagccgccccccaggtagagggcctgggttccttccggaagggcggtgtcttccagcggagaaaagcaggtgatgtcccagcccgtttgcttcagccgttccaggttgtccccgtagtaaaaacagaaggcattatcccgggctacggccagaatcccgtggggaggggcgggcggcaggggaactttcagcggttccggacgtctgcgttccgtgatgttcatcagcagttcccagttgacgcgcttttctgcctctgccgccagccggaggaaccaggattgctgccgggcttcctcttccgcgggaaccaggcccagctgccgttccgggagcgtccattccgcgtttttggggaacgccgccaccagcggcggcatcctgtggtggtccagcgcccggcgcagaaggtctgcgtgcgcggcgcttcccacgccgttggcaataactcccgctatgttcaggccgggatggtgctgggagaagccgcggacgacggcggcaatggatcccgccatgccccgcgcctgaaccaccagcaggacgggcaatccgagcgtaagggcgcagtccgccgtgcttccttccaggctttccggcgttctggcgtcaaagaggcccatgaccccttcgcaaatagcgatgtccgcgcaggaggcgtgccgtgcccattgggaacggactccgtttttccccatcatccacgtatccagattgaaggaaggcaatcccgtcgcctgccggtggaaggaggggtcaatgtagtccgggccgcacttgaaggcctgcacgcgtaatccccgggcggagagcgccgccatcagggcgagggataccgtggtcttgcctcccccggactgggtggaggcgatgcagaaggcgtgaaaaggcttattcatgggaaacaggcaaattctgcggatgctgtctttccggatcaggtcaggatattccgtatttgtcggcgtagcctctccgttcaaaaaggacgtctccgtccctgatggtcctggggcctcccagaagcaccagcgtggacatgtccacgtcctccagcgggaattcgtccagcgtccccacccatttccgttgggccgggcgccccgcgtgcttcacgtaggcgcagaggtttttccccccgcgttggttccggaagatgcgcagggcctcctccagcagatggcggcgtttgcgtccggcggggttgtaaaggaccacgggcagcgccgttccggcgctttgctccaggttggcacggatttcctccgcagggaccagcaggtcggacaggctcaacaggcagaagccgttctggaggggcgcccccagcgcggaggcggaaatgctggccgccgtaattcccgggagcacttcaatgcggaccggggaaaagcgttcgttttccttcctcatttcgtagagcagcccggccatggccaggatgcccgggtcaccggagcagaccatgcagacattttccccgttcagagccgcttccagcgcggccgtgcaccgcggcacttcccccatcatcccggtctggatcatctttttcccgtggatgcgttcccggatgaaatccaggtatttggtgtagccggctatgcaggtgcattgctccatggctgccgccgcttccggcgtaagctggcccggagacccggaccccagcccgatgacgatgacatttccggctccttgacgggccttgttccggctgccgtgcgggcacgttgccagggccagcgtgacgttcccgccgcaaacggttttaggagtgctgattttacccccggaggccagaatggcggaagcctcggaaacggaatgagtccccgttttttcaaaaacggcgtctgacggcgtggggatttccacgctgtccagctgcgcgggcgtaaaaacctggaacggcactccccattgttcagccagggccaggatggccgactcctgctccttgagcgtgcaggaggcaagggctttcaactgggtacgggagattccctcccggtgcagaaattcctccgcgctttgtttcaacaggtcggggtccgtcccttttttacagcctattccaagcacgaaggaggcggaccggatggacagtacaggcgtttcccccccggtttctggcggaaccgcatcccagtacacggcgggagtatccggcgtttccgtggtatccttaccgcccgtttccgccggaatgaccttggggcagtccttccagtaacgttcgtaaatctcctgcggaccgtggaagaggatggtgtctccggccagcagggcggcgttcagggttttaatggcgtccggattgagaacacaggccttttccctggccgccgcttcgtcaaaggcggtcattccccgcgtatccgtggcggtggtgatgacggcttcccctccgctgatgcgggccagcctgcgcgccaggcggttgccgccgcccaggtgcccggagagcaggggaataaggtgggaaccggattcggagcaggaaagcaccgccgggtccgtggccttgtcccggagcaggggagcggttttcctgatggcgatgcccgtggcccccacaaagacgtgggcgtcaaactggttccactgccgggccagaagctggtcaaaatcttccggcttcacccggttcactccttcttcctcctcattcctgcatacggagtaaataacggtttttcccagggactgggatatttcagccgccttccgggcgcccttggccgtgaaggcgtaaaaggcgcagcttccgttgaaccgttcgtcttccttctcattccggtagccgtggctgaattggccgtgatagagcagggactgcccgcagtcgtgcgcgccgatggcgtcacccaccaggatgagggcctgcctgccgatgcccgcccgcgccgtttccgccgcgatggtggacagcgtgccgcggatgatcttttcatccggccaggtggcgcggtacactaccgccgccgccgtatcgggggatttcccggcggagataagccgtgcggccagttcatccagcttccccgcgctgaggaagaatgccagcgtggcgcccgttttggcaaaggcctcgcaggcttccccggagggcatgggcgttcttcccggggtgcgcgtcagcaccaggctctgggcaattccgggataggtcagctccgtgcgcaaggccgcggcggcggcaaaaacgctgctgactcccggcaccacaatggattcaatgccctttttgtcaagcaggtcgaattgctccgcgatggctccgtacatggacgggtcccccgtgtggaggcgcaccaccttctttccttccagcaccccccgtgccatgacttccacctgttcctccaggttcattctggcgctgtcatgaagttccgcctccgggcggcagcgcttgaggtgccccgggttgaccagggacccggcatacacgactacgtcggcctccttcaggagggcggcgcctcgttcggtaatcaggtcttcggccccggggccggctcctatgaaatggatgggaaaacgggcggtattcatgcgcgggaataggtgaaaagggtgatgcggttgccgtgccgcagatggtggtaggttccggcaatgggagattcggaggcgatgtccagggagaacatccccgtgcgtgcggcggcgttccagccgtaaagcaggtgctcgctttccgtggttacggcggaggctaccagaaggccgccggggttcagggcgtcaaaacaggcctgcatgatggattccagcccggcgccccctcctcccgtgaaaatgcggtcgggcttgggcaacgcgtccagggcctccggcgcttctccctgcatgcaggcgtaattcacgcaccccagcttccggcagttccggcggatcagttccaggcggccagcctgccgttccagcccgtacacggaaagtccggggcgcagggcggcggcttccaggccgatggagccgcttccggctcccacgtcccacagcacgccccaggcaggtaggcgcagcttggacaggatgaccgccctcacttcctccgccgtaatcaggttgttctccttttcataaaagtccgccggcagtcccagcggcaggacgggcgcggctccggggcggttgtccggcagcagcaggagcatggaagtaggggagcattcctcccgggccagctccgccagggttccttgcagaatgcgctcgtcagccattcccaggcattgggccgccacggcggaacgccccgccgctgacggatggaactccatggccgccgcggccaggcggcaggcggtgaagggatggccaccgtagatgacggcgagcggctgggccagaattttcccccacggaatatattccgtgctgtgcgcgctgaagcaccgggcgcggtcccacggcatgcccaggcggtggaacagggcctggaacgcggtgggggccgggatgaattccagcctgtccccgtcacaggccagggaccggagcgtgcctcccatcccgtgaaacagggcgtctccggaagccagcaccaccacgtttccgccctgccgggcttcttccagcgcctcccgcgcctgttcccgcgcgttcctgccgatggggacgcgccgtgcgttgcagggcgggcactccttcagcagggcggcggaagcgtacaggctctgcgcctctgccagtttgtccagcagggccggggaggggtgaagcgggcctatgccgcaggaaaaaacggtcaggggaggcatggaggtatgtcgagaagaaggttgccggaaaaaccggagatcaggaaacggacgggcaggccgggcacgtggcgctgaaactggcgccgggcttccgcggccaggtcccggtacagggaaaggtgggcctcttccggaaccagcgccagcgcctggcgtacggaggaacaggccagaatgctccgccgcgcttcatccgccagcgcggcatggcgttccgccgtgcggagaaaaagctgcatatcctgcgccaccttgtgggcgtgggtattggcaaatccggcggcgtacttgcagagcttgcccggcatgcaggccactacggcttccgccatgccctgttctcctgcgctctgaaggctttccgcaatgaaatccccaatgcagatgaaggagatggaggggtatcccggcagaagggacttggccagcgcggccgtcctcccccccgtgcagaagaccgccttgtcaaagccggagagccgggtggagcgcacgcagatgcggatggtggcaatataggcttcatggctgtacgggcgcacgatgccgctggtgcctaaaatggagattccccccaccacgccaagcaggggattgagcgttttcccggcaagccgttccccgtcccggacgcggatttctgccagccagcagccttcccgcatcccggagcgggccaggttgtccgcaatcatgcgccgcggtccctggttgatggcccatttgtgctgttcgcagtccagtcccggaagcgtgcacaggcctatgcccccggcagagcgcaggataagggtggccccatggatggatagaaggtaatcctccggggcggcttcttccggaacagccgcccggacgcgcgcctccatcacggctccgtgggtgcagtccgggtcatcccctccgtccttgatgattctggaaaatcccggctcactggccgccagcgggagcgttctcgtttctccgtccggaaaaagcaggggaatggattcgctgatgttctcgccgttcagcgtcctccacgcggccgtgatggcggcggcggcattggccccggtggaaaatcctttccggagcggctgggggaagggggaggacatgggacggaatacggcggatggggaggaatgcggaaaaatcaggcggcaggcaggttctccagaatggcgtgcagggtagtgacggccagggcgcttccgccgcgccgcccgtccagaacaatctggggcgcggggcaggtccccgtcagcaatttggattccaccacgttgacgaagcccacaggcatgccgacgatcagggcgggcctgatgccctcttccagcacataccgggagatgcgggccagggaaaggggggcgttcccgatgaggacgatggccccgtccaggatggggcgcgccttttccgcggcgcagatggcgcgcgtcctcccggtggctttggcctgcgcggcgatgtccgcatcagcaatgtagcaatggatatcctccttgctgtaaccggggtgggcgcgccgcaggcgttccacggaaagcccggcccggatcatgttggaatcacagaaaatggggcagtggttgcggagggccgccagggcggagggtatggggtcatggcggaaagccagccccgcggcaatggaaaggtccgccgtggtgtggataagcctgcgcatgaccttccattcggccggcggcagttcttcccagccctggaactcccgttcaatggtggcgaagctttccacctcaatggcggcgggggacatgtcccagcgtatttcaggtgcggcggtcatgaggcgtcagtgagtataatgaatgaaaaggcccgtcagggcaatcagaagaatggccccgatcatgcgggaaagctgcatgacgagcacgatggtcagggcgtcccgcgcggggaaaatgcccatggcggagggaaggttgcgccgcagggcgcggatggggttgccgatggcgctggctaccagcatggccagcagaatctgggaggaggtgaccatgccgtggctgcgtaggttggcggccacccccgcggcctggaccaggccgcccatctgcgcggccacaatgctcatgagctccgcggggaaaatgcggttgacccagtccggcacgtgctcctcccaccaggaaaacaggccgtttttcatcagccactccacgccaatcatcaggggaaccgtcaggcagagcatgcggaaaacgagcgcgagcacccgcaggcacgtctgccgcagggatttgcgccactccggggaggggcgcccggcggcgggagcctccccggaagccgccgcctgcggaacggcagcggggcttttcctgcggtggaggaacagcacgcccgcaatgaacaggaagccgaagcccatctgccagccgaagtagcagatggcgggcagccccaccgcgccaatgacggggtacgccacccgcagagaatgggagacaaaggacaggtagctgttcatcatgcctcccgcaatcaggttggaatgggtgattttgccttccgcgtggctgctcaccagcatgccgttggccgcggcgttggaataaagggccgttgggatggacaggctgatgatttccggcaggtgggcccagcgcgccagtccgccgaacagcttgcccagggcaaaatgaaagcggaagatttctgcaattccgccgatgaaggccgccagggccaccaggccgatcaggctgcctatctggggcaggcgcgccaggattttctccgcgcctgtttccggagcctgcgcgctccgggaatgatggcgttttctgggcgccggggccgggctggcagcgggggcttcttcctttccttttgcttccccgcgcgtctccgcgggagtctcccccgcgggcttcatggacatgcggggccttccggatgcggaggcgtccatgcccgcgggcatcttcaccaccatgactccggaggccgccagggccagcaccagccagagccagcggaaaggctggcgccagggataggtgcgggagtgcctggtgccgttcatgccttcttgacgaacatcagggaaaggtattcttccggcctggcggcgatgacgtcaatatcgtccgtaataaactcgtcgggcatgcccagtctttccccgtaaataacgcggatatccttctcccgccggatgcgctccatcaggcgcgcgcggctgcggtaggtcttcatgagaacggtggtggttccgagcgggaactccagggaatccgccatctccggcctgaaggcgggaacaacccgcagcctttccccgttttccaccaggatctggcggctgtgggccgccagggtgcagtaggaggtgatccccggcaccacttccgtgtgcaggtccggattccggctgagcaggaggctcaggatatagcccagggtgctgtaagtcatggcgtctcccagcgtggcaaaggcgcagtcctggccgcgggaaagggcctcctcaataacggccgtattcctctcaatctgttcctgccgggttctggcgtcgcgggacatgctgaaaaccagcttgtggaactccgccttcacgccgcccacggaccgcaccactgcttcggaaatgctgaaatcactgttggggcccgtcacggtaaacaccacgtccacggaccggaacacgttgacggccctgagcgtgaggtattccggattgccggggcctatgcccactccgtaaaattttccgggggaggacatgtcaatgcgcttgtttgggagtcatgaggtcgtccgccgtggtccgggcatggcgggagaaaacggcgcggatgcccgggttttcccccaggcccttcaggtgtgttttaacggtgaacccctccttcctgagcatggaggcccaggaatcctcctcgtccccgcccaggtcattcttggcgtggtctccggccaccagcatgaaaggggccagccagacggtttttgcgccggatttcttgagctgttccagaatgggggccacgccgcgcgtgccttccacggtggcgaaaaacgccaggttgtcgcggttgttcagctctcgggcaaaatcggaaagcaccatgtcgcagcggccttcctgctggccgtggcccatgagcaggatggcttcatccttcttccgttccgcggggaaatgctgtaaaaaggccgtaaccgcctcgtccctgtcccgttcgctttccagcaggggacggccgatgaacacgtggtcgaagctgtccggatggcgtgccaggaagctgacgatctgcctctccatccgggagaattcctctccgggggcgatgtggagggactggacgcgcagcgtgcggatgccttcgcgggccatgcggtccagattctcctccacggagggaaccggggttccgcgtccggcaagcttcctgcggatgatgcttgaggtgtagctccacttcaggcggtccggggcataatgggccagaaggtccttttccagctccttgtaggagacggtggcgtcctggtggctggtcccgaaggcgacgagaagaagcccttcctgctgtgacggagccgcctgttccgccggggcgggggaggcctccgccccgcatggggcggcggaaagcacgggcagggaaaacagggtgagcccggcaagaaaaacggaggaaaagggcaggaacgcccccggcaggtaagaggatgtttcaatcatgcgttgataaggtatggtgaaccaaagcaaggatattcggactccgggtctccaacctccccctcgccttcaccctccggaatgggaggactggctgatagaacgcctggtgaaaaacgttccctgagggtttgtaacccgataccgcagcgcgactgtttccggttctcacggaattccccgttgcttcggcgtgtttaatggcgtttttagccgtcagtgtcaatgtttattagaaccgccgccggatttccggcgagcggtggaaaaggtgcgtgaacgggtaaaagccgcctctccgcccgccccggaaaaaggcgcagggttccggctccgggagacgcggatttccagcccggcagtccgcaggcaggcgtttgctgcttgccgtgggcgggaccggtgtgagagcatggggtatggcctcttctccggatgtagtagaatatatatgtttccagctccggcatgccggggatatttccttcaaaaaaatgttcggggaatacggcctgtactgtgaccggaagtttttcggcctggtatgtgacaaccaattatttgtcaaaatcacggagccgggcctgaagctgctcccgcagcaggagcagggcagcccctatcccggcgccaggccgcatttcctgatgacggagctggatgatgaccgggctctttcctcctttgtccgtgaaacgtgttccgtcctctccgctccggatgtcttatccgggaagaagaaaaaagcttccggagaaaaaagaaacaggcgtccgtaaacgcctgttagtgccggatgaaatgccgttcggctgaaaggcttatttatcttccggagactcctgcacggccagggaagacaggcttcttttcaggttgtccgccacggtctgcgtggcttcattgtcagactccgcgaatttgtccacggcctgcgccagggacttaaggtcggattccgaaaccttgcggcctttcgccttccgctgttccagggcggaaatcttcttgttgaggtcggccagtttcggcaggtccttgttggctttcagagccgccagcggttcgtcaaactccttgacggagggcaccgccgtcttcaggcgcgtgatggccgtcaccgcttccagcgggttggactggatctgggcctgcaccatgtccttggcgtctcccagccattcgtcaaaagcgccgcacacggcctgcgcctcctcgtcgtccgttttcttccgcaggggagtgatcttggactcgatgttgctgccgttggaaacgaccgtcttggccagggacttgtacttgtccagctccacgccttccaggatgggaaggccgcgttccgccttcatcacctccttcttcaccaggtcgtaaagctgggtggggtgccccttggccactactttgccgttggcgccgatcagtacggcatgcggcaggccgcccgggcaggaggccgccggaatatccagcccctggtaaacggggaaggtaatcttcttttcctccaggaactgcttgatcctggggctcggcccctggcggtggctgcctaccacggtaaagcccttggactggaacttatcctgcaattcctgcaaatgcggcatgctggcgatgcagggcgggcagttgatgccccagtactcaaaaaacaccaccttccccttcaggtcggaagccttgatttttggtccgtggaggtggctgctgtcgtcaaaggaagggtaggtgactttggctccggcgccattatccgccgcatggatgaaagccggggccgtcatggcggcgatgctcccggacagaagaagggcagtaaaggttttcataggatggatgatgcagaatccctcattgagtgtcaagaaggaagcccgctccccgcgccgggctccccggctgcccgttcctgtggggaaagcgtctcaggcaatatccagccccatgatgtaatccgtcatgtaatagccgtggcctatgtggaaatccccgcgttccagttcccgcatgcccatgcgctggtaaaactccaccgcgcgggtgttgtagcggttgacgttcaggcgcatcaggcacggttccggatgaatgctcctgatgtagctgacggcctggcggaacaggtagctgccgatgtgcaggccctggaaaccgggcagaacataaatcttctgcaagtggaaaacgccggggccctccggctggacggacaggtagccgcagtgctccccgtcatgggaggcgatgaaatacacgtgcccctcctccatctgctgcttcaggttggcgggggaatacatccagtccatcatgaactccatctgctccggggaaaggaggtcccggtaggtggcggggaaagcctgcccggccagttcatgaataagcatgatgtcgtctttggtggcttggcggagtgtaggcatggcggaaatactacacggaaaaaggccggatgaaaagggcctcttcccggtttccggtggaatttgcgggcatggcctactttcccctccctattccggcgggggcgttttatgctggatggcacaggcttttttaacggaaaccggggtaaaacctgtctgtatggtgtaccccgcatgcgcgccagaccatgaaagaacccattcccatacaacaatggctccctgccgggccgctcagggacatgggggaaaaatacgtaagccagcttccggatgtggcgcagaaccccatcagtccggaatccttcattcatcactccgaccattcctggacggaatacctggtggcctactgcctgctgtacccgtgggtggtgatcgccctggggctgctgggcggcctggccctgggagcctactaccttttttgccgccgccgggaatacgaccaccgcattttctgctccaaatgcggcaccatgatgtacccgtgcggcctgcactgccccaagtgcggcacgcccaatcccaaaccccgcgccctgaactggatcggttattccaggctgcgcaccgtcattccgtccaccggatggaaaaggcatgaggaagtgcttcgcagctaccggcggtgtttttactgcgggcagccgctccatgaacctacgctggaacagaactgccctgcctgcggaaaagcggtgctccagggggagcaatccgtggaccgttatgatgattacattgcccggcgcagggggtggacctttgcggccgtggtggtgctgggcatcatccccattctcggccctctgctggcctcctccctgtacaagagaacgctcgtcaacccgtactccctgtacatgaccgtattcagggaaagcttcctgatggtggtgctctacctgtgccgccacctcttccgccttctgcccttcatcggaaccatcggcatgcccatcctctgcgtgacggaataccacctctaccgccgcatgttcctctggaaaacggagaaatatgactttggcggaaaagggaaggcctgaagagcgcttacccccggtccggatatttccggcgcgtgcggggaatggtgggctgcgggattgacttgaagccccggcaacgtaccttttcgccatgcagatgcgttacgtcctgtttgcctccatggccgccctttgtctggcgctggccgcctgttccgtcacatacggcaacaaatccgtggcgtccccggaagtatacggcaggctggcgccgggaaaatcctccaaggcggacgtttacgacgcgctgggccagccctccgacgtggtgaccatgaaaaacggcgtcttgtggacctaccgctaccgcaaggctaaaaacgacttcctgggcaatattcccctctttggcgtcggcctgattgccggagggaaaaacggggacgtttatacggtgctggccctgtttgatcggcgtggcgtgctggcctcccgcacggcggcgcggcagaagctgtacacctccaatctggcctccctgaaacgctccctggacgtcatgatggagggcgaatcgtcacaccggcgggtggaaacggagatgaaaaaaataggcaggccctttgatccgtctgcggccaaggatgcggacctgctggaaaagtctcttgattaacggcctgcgggctttctcttccttattgtatcaagtatgacaaggaatcgtttttttctaatggactaaacttactgcatacagtaagtaggcggcgttccccgaagggatacggcagggattcttcctgaattcctccgctcccggtggagcaaaccctatagaaaaatagaatgaaaatgaaaagaaaactggcattggttctggcgaaggctttctccggaaagtccgtgccggaaaagaaacgggaaaaagaggtaaaggcctccaggaaactggaagcatggctgaaggcttccagaatgcggtccttctagaaaaggcctgctgacggaaaaggcggattcgggcgctggccgcccggttcgcggggagggacggggagaaaaaattgagtctcctttttttcatcgtaccataaaacgatgaagtgcgtgaatgggacgatggggacggctgggtcctttgggacggagagggaagggaggacagatggatgacgggcgtttactgcctaagggaggcggctacagacggcttctttcattccgcaaggcccaaatcatttacgatttgacggtagctttctgcgacgctacttgagtcgtgatgcgcgtactactgaccagatggtgcaggcggcgcgttccggcaagcagaatattgcggaggggagcatggcttccgttacttcccgtgaaacggaaatcaagctgaccaatgtagcccgggccagcttggaagagcttctgctggactatgaagattatttgcgtacgcgcgggttgaggctatgggataaggattctcccgaatctctgtttatgcggaaggcctccctgcggcatgaccattcggaatggtttttaaatctggctcattccagaaacgatgaagtgttcgcgaatatggcggtttgtctgattcatcaggccgcttttctcttgaaaaaacaaatgaatgtactggaagaacggtttttgcagaagggaggcttaagggagagaatgacccggctgcggaagcagaggagaaagtcgggaagctcgtaaaagcaattgtctcaccggtctcattcgtcccaatggtcctcccgggcaatttccgggctgggttgcgggtcaaaagatatgtcttcatgacagttgcgccttgactacggcgttggaatgtccgttcatctgggcagacatgaccatacccggaattcttgaagaaaagttgtccgccgcattgaaagcggtgttgggggaggagcttcccgctgatttttgcgccagtgtgacgccgtccgcggatttgcggttcggggactatcagagcaacgccgccatggtgcttgccaagcggtgccgcacgaatccccgcgctctggcccagcaggtggtggaccggatggggcaggacggcgtctgctccctggaaatcgccgggcccggcttcatcaacttccgcatcaagccggaattttacgccgcgcgcctgctggccatgctggcggacgaccgtctgggggtggagaaggtgcaggaccccaaaaccatcgtcattgacttctccgcgcccaacgtcgccaagcccatgcatgtgggccatatccgctccaccatcatcggtgacgccctctcccgcgtggcccgctttgtggggcacaacgtgattacggacaaccacatcggggactggggcacccagttcggcatgatcctgtggggctggaagaacattctggacgagcaggccctggccgccaaccccattgacgaactgctgcgggtgtacaaggacgtgaacctgatgtgcaaggaaaagccggaactgctggacacctgcaaggcggagctggtgaagctccaggccggggacggggaaaacctggcgatctggaagcgctgcgtggaagtctccaaatccggcctttccaaaatctacggccagcttgacatccactttgactactggctgggggaaagcttttacaatgacgccctggccccgctggtggacggcatgatcgccgccggaatggcccgtgagagcgacggcgccatctgcgtgttttccgacggctccgtgccgcccaatgaagaccccttcctggtgcaggacaagggggaatggcgcgccaacccctgcatcatccgcaaggcggacggcggcttcctgtacgccaccacggacctcgcgacgctggaccaccgcatcaggacgtggggggcggattccatctggtacgtggtgggcgcccccaggccctgcatttccggcagattttctccacgcagcgccgccgcggcatggacggggactaccgccacatcgccttcggctccatcctgggggacgaccgcaagccttttaaaacccgctccggggataccgtctccctccaggacgtgctggatgaagccattgaacgcgccgcccgcgtggtggaggaaaagagcccggacatgccggaggaggaaaaaaagcgcgtggcggaagtcgtgggcataggagccgtaaaatttgcggagctctcccagaaccgaatgacggattacgtcttcaactgggacaaaatgctggccctccagggggacacggccccgtacctccagaactcctatgtgcgcgtccgttccatcttccgcaagctggacggcagcccgctggactggtccgcccccattcagctttcagaagatgcggaaatgcatctggcgcggctcctggcccggtacggggaagtggtgccgcaggttctggacgactgccgcccgaacgtgctggccgcctacctctttgacctggcccgggccttccactccttctatgaggcgtgcccggtcctgaaatcggaaggggctgtgcggcactcccgcctggccctgtgcgagctgacggcccgcaccctcaagcacgggctgggcctgctgggcatccagcttccggacagaatgtaaccgtttcttccttatgaacgcctctttccgccatgtcctgctggccgccgccatggcgggattctgttccgctgctgggggcggggaacacgggtactggatgagcagcccgtccctgaacggctggcgggaggccgtcttccgcgccggcgttccggcacagcctgccgtgctgccgcccggcgtggagccgatgatggtgggctcctcctctcctgccgcgcaaatgctggtgctggaaggaatgacgcatctgctcaccttcggggacatgcgtgctttccggaaatttgacgccgcgctccggctggacccggactgcctcatggcccactggggcaggtgcatgagcctgatgggcgccggacccgcttttcaggaccagcgcgtccattccatgaagcgcatgaaggagctggcgctgcgtccggactgtccggaacaggaacgcgcttatgcggacgccctggccgtgctgctgatgaacggccccgtaaaggcgcaggaagcgtggaaaaccatctgctccacctggaagcgcgacccttacgcacccctcttttacgccatgctcctgcgggacggctttgacgggcacggcaaccccggagaggggcagaaagaggccgtccgcgtggtggacgccgtcctgaaagaacgccccggctcccaggccgccctgttcatgcgcgctctgctggaggaagtggctcccgtcatttccccggaaacggtggaaaccgcccgcaaggccgtggccgccaaccccttctccgcgtccgcccatcatctgctgggccattgcctgttccgcacgggggactatgaaggggcatgcgccgccttcaaggactctgaaaacctgtgcctggcctgggaaaaggcggaaaacgttccccccgcgctggatgacgcctggttccgctccatcctttaccgggccgtttccgaattctgcgccggacattacaggcaggcgaatgccgtcgccgcccgcgccgcttccgttcccctggacaaaaagcatccgctggcccccggcaccctcctgcaaatatgggaggccaggacactgcccgcgcgcctgatgctggcccggcctgacctgcccgcgcaggctcttgtgctcaaggcttctccgggaccgctgcccaagggatttccggacttgagcaacggcatggcggcagtggtcacccaatacatgggcgcctgttactctgccaggcagggcaggccgggcgccgtggcgtccgcctttgacaaactgtccggcgttctgcgcctgctcatggacggcgcggacgccgcccggcggcagatgagcgtctcctactgggctcgctgcctccagatgggaagcctgtattcctctgaaatccgctccctcatgttcccggactccgccagcgtctggatgtccgaggccatcgggagccagcgcttctcctccctgctgctgccccccgtggtgccgtaccccgcggaatggaagctggcccgcgcctatctgaaggccgggaaataccgggaatgcgcggacatgtgcgaacaggcgctcaaacgcttcccgaaccatgccggagtgctggacacgctgaaacaagcccgcgccgccggaaaataatccatcctgccatcctgccgtttctcatggaacggactggagactccgtccccggcagacgggaaagggactgggatgaataaaaactttggaaaggcgaacaacatggatatttacgaaagactgaaaaacggagaaccgatcaacacccgggaatccagggaattcaaggaaatactgtggccggaaacggtgagaagccgcacgctttgccagaaaatcaattcgctcccaccgtttgacggggaagtgcgggcgctcgtgaatgaactctttgagggcaggttcccggaatcctccaacatctctccccccttccagattgaccgcggacactgcgtctcggtgggcgagcgcgtattcatcaatgaaggcctggacgtgatggccgcgggaagcgtcacgatagaagatgacgtgctgatcgggccgcaggtctccatactgacgtccaatcatgatgccggcaacttgttcatcttgaaaaataagcctgtagtgataaaaaaaggggcgtggatctgttccagggcggttctctgtcccggcgtcacggtgggtgaaggggctgtcgtaggcgccggctccgtcgtaacgaaggatgtcggtccgcataccctggtaggcgggaaccccgcagcattcattaaaaatatttaacaggcaaacgccgctcctccggattctcctaaaacatggtaaacttcatcttttcatggccgccgcagggaaggccggagctcccatgaactcctgtattcccggaataaggccatcttcattttcaataacaaatacatcaagcaacatgaaccatccctatctggacccctccttcctcgtttcctggtcacggctcacgccggacgccatcaagccggacgttacggaagccatcgcccgcgccagggcgaacatccaggccatctgcgaccagccgctggactccctgacctatgaaagcaccttcggcgctctggaaaaagcctctgaggaactgcacctcggctggggccgcatcatgcatctggactccgtcaatgacgaacccgcccagcgggaagccatcggggaaatgctgccggaagtggtcgccttctcctcctccgttccgctgaacccgtgcctgtggacggtcctgaaagcagccgcggcctgtgactgggtgaaaaacctctcccccgtcaggcagcgcttcattcaggaaacgctggcggacttccgtgaaagcggggcggacctgccggacgaggtaaagccggaatatgcggaaatagaagcccggctctccctgaagaccaagaaattcgcggaaaacgtgctggactccaccaacgcctgggaactcatcgtggaaaatgaagcggaactctccggcctgccggactccgcgaaggaagccgcccggctggacgccctggccaacggccacggcacggaagaagccccccgctggcgtttcacgcagaaattcacctccctccagcccgtcatgcaatttgcggactcggacggactgcgccgtaaaatgtgggaaggctcctgctccatagggaaggacggggaatatgacaacgaggccctcattgcggaaatcctggaactgcgggataaaaaggcccatctgctggggtatggctgctttgcggactacgccacctcccgccgcatggccgggagcggagccaacgccttgaattttattaatgacctccatgacaaggtgaagccctccttcctgaaagacatggaagccgtacggcggtacaaggaggaaaaaaccggaaaacccgtggaaaagctctccccgtgggaaaccgcctactggtctgaaaaacgccgccgcgagctctactcctttgacgaggaagatttgcgcccgtactactctgtggaaaaggtgatggacggcctcttctccatctactccggcctgtacggcatcacggtaacgccgcgccccacggtggcgttcaagcccggtgaatccggggaagtgccggaaggcgcggtggaagtatggcacccggacgtcctgttctatgaactgcatgatgcggaaagcggggaacatctcggttccttttatgcggactggcatccgcgggactccaagcgcgccggagcgtggatgaactacctcagcgtgggggaacccccgcgcggcggcaagccccgcgtgccccatctgggcctcatggtcggcaacatgaccaagcccgttggggacaagcccgcgctgctgtcccaccgggaggtggaaaccatcttccatgaattcggccacctgctgcaccagctcctctctgatgtggaggtgaaatccctggctggcaccaacgtggcctgggactttgtggaactgccctcccagatcaatgaaaactggtgctgggagcgggaatccgtggacctcttcgccgcgcactatgaaacgggtgcaacaatcccggacgaactgttctccaaaatgcgcgccgcccgcaactacatgagcggcacggacttcatgcgccagctctgcttcggcaagctggacctggagcttcacgtgaactggccgcagtacaagggcgctccgctggaggaaacggatgaacgcatcctggcggactaccgggtgcccatgacccaccgcggtccctccgtggcgcgccgcctgacccacatcttcgcggaccccacgggttatgcctccggctactactcctacaaatgggcggaagtgctggaagcggacgccttcagccgcttcctgaaggaaggggtgctgaacccgcagaccgggcgcgacttccgccgctgcatcctcagcaagggcaacagcaagcctgccgcggaactctaccgcgacttcatgggccgtgatccggacgcggaagctctgcttgtcaaatccggcgtcctttaaatcaactctctaatataaccctcatgcctgaacaaaaaagactctctctcgccggcatcgggtgcggctcccgcacgcgcacctacatgaagctggccatggaacaaaaagaccgctaccgcatcgccgccgcggcggaccccgtgaagcagcgcacggaagccgtgcgtgactttgccccggaggaagagcgggactccatccgcctgttcaaggacgccacctccctgctggaggaaccgcgcctggcggacgtagccatcatcggcacgcaggacgactaccactacgccccgtgcaaaaaggccatggagctgggctaccacgtcctgctggaaaaacccatcgccaagacgctgagagaaacgctggaactgcgtgacttggcgcgccagctgaaacgccgcgtggccgtgtgccacgtgctgcgctacacccagttctaccgcaccctgaaaaaaatcatcgccagcggggaaataggggacgtcatcaccttcaacgccaatgaaggcgtgggggcgtggcacttcgcccactccttcgtgcgcggccactggggcaacagcaaaacctccacccccatgatcgtggccaaatgctgccatgacatggacatcctctactggctcatggggcggcgcaagtgcctctccgtagccagcttcggggagctcaccttcttcacgaaaaaaacgctctcctccccccggccggaacgctgcacggactggaccaccccggtgggggaagacccctgggacgcccgcaaatacgccacggacgacgaatgcaagcgctggctgggcatggtttacgaccgcgcgcaggaagccaccgcggaggaaatctgcgaatggcttgaaacctccccgtggggcagggactacctccagtgcgacaatgaccagccggaccaccaggtttccatcatgcgctttgaaggcggcctgaccggcaccttcacgatgacggcctttgaacagggccgccatattgaagtatacggcaccaaaggcaaaatccgcgccggagccttctacaaggaaaacggccccggtgaaatcaccgtcacgccccactttggcggaaaaacccgcgtggtggagctggaggaactggctggcggctaccagggccacggcggcggtgactgggggctggtggaagccctttacgatgacatgctgacggttccctctccggcggacatgaccacctccattgaagaatccgcccactcccatgtcatggcctttgccacggaacacgcccggctgaccggccaggtggtggacgtggccgaattcgagcgccgggtcatgagaggtgaactggactactgatccggtagttcaacacttcaatttccagaaaacggacgggaaaccgtccgttttttattgctggttccggatgtggaaccgtagatggctgcaaccatcttcctccatgaaaaacggaataattaatggaattcgtggaaatgtagaaaaagaatatttggtcaagtctggaaatcataaatattccggttttaaatgataaaaaataacttattggtcaggacagggttataaaacggacggatttggaatccggagtcaagcctacaaaattgaaagaaaaacgttttaaggaaatttggcttggcaatatcctggaaattgccgtagggatttcctgatataacaggctttctttttgttccggcgatcattactgaccgtctctgcatgttggcggcggtagccgtcagggccggcggtataaggctgtgaaaagggggatggggaaatgttgcagagcatcaggaagaacaatttttcacggctgtaacatccataccggattccaaatccggcatatatcttgtgaattggctaaaaccatgaagaaatcattcattctgctattattggcaggcgccgtctccgcggcttctgcggcttccctgaaaattaatctgggttcttcctctgcgggggatccggattggatcagtgtggctacccaggcttcctccatcacgggaggaaaagccgcctcctacgcctccattgcttccttgagcaaaaacgggggaaacgtttccccgtccgtggttctcggcaatctgggcggtcaggacgtcacgctcaccatggcgtacaaaagcaccgccgccatgaatgcgggttacctggacgcgacaggcacgtccccctccatcaactccctcttcccggacagcatggcgcaatcttccatttccggcaagtgcaacggggtgaagggacagaccgtcggcctgcaattcacgttgagcggcctggcggccaataccacctattatctgtacgttctgggcaacaacggtttctcaaccaataaaaccagcatggccctctcgggcggtgtcagcaatgtcaccggcagcctgatggacggctatgaaggagcgggaacggtgaccggttcaactttccaggggacgacggattcttccggcgtggggatggaatgggcattcaccacaaacaattcgggccaggtgacgctcacttatgaacgctccgccggagcggccgcggatgtggtaaatgcagatgtcagcttgaacggattcatgctggcaaccgagcccattcccgaaccggccacggcatccctggggttgctcggactggcggcgctgctgttgcggcggcgcaaaaactaaggagcattcagcattatctttgacgagatgtccggaaagaagggatggaccgcccatgttgttcatccctcctttccggcattttttatttgcagaagtctatctgttagattatttaataaccttatatctatgaaaaagaaatctctcttcggcgtccttgtggcggtggctctctccgttctggggaatccggggcagggtgcgggaacggtggaatcctttggcgtggacttcggcaatgcggcttctgcggcacagccgggctggacgaatatgggggtggtgaccaccacgccatcctccacgctgaaaagcgtgcccctgcggaggaataacctggaagcctcttcctcccccgtgctggctggaacgctgtttggccgctccgtttatctggcggtaacggccaaatcggaagcgagcgtgggaaacatgtgctataacaacgccaattcaacgtggcgggaaaagggggaaacccgcggagggcagccgggcggcgtgctgcaggcggaaagcgccttctcctttccgaatcatggggaagccctgaatacgagtttgcaattgtttaccaacggcatggcggtccgggccggcacggtgcgcgtttccctctccggactggcgcccggcaaggaatatgccgtttcttttttcctgggcagcggcaagcccgcgtaccagtccgtttccctggtatccggcgctcatgtggacgtaaaggcgcttcagacctccaccggttcccgcacggaagacacgtggaaagggggcgtcaacacggcggacgcggatacctatatggcggtggaatggaccgcggcagcggatgaggccgggacgctcgtttttgacgtggtgaaggaaggcagctccgccggaaccggaaccctgaatctgaatgcgctgactgtccgcacggatgataccccggcccctcccgctccggagccgaagcccgtcagcgtgctccacaacagggcgctgaccgttctttcctccccggtggcgcttcccgtgcctgcggatgcctggaccggaacgggggaaatgacttgcgaactttgggtcaggccggatggggacgccgtctccggcgctattctttccctgggggcttccacgctctccctgaacggaggccgtctgcatctggaatccgggaatgcggaaactcccgcctccgtggaggcttccggccagcccttcgccgccggaacctggcaccatgtggccgtggccctgggaacggaaaacgtcagcctgtatgtggacggaacattggcgggaaccgctcctgccgcgccttacctggcctccatgaaaaacggctggacaggcctggtgctggctgcgcagttcaagggagcccgggacgaactgcggttctggaatgcggagctggggaccggagcggacgactttttcctgacggggccgctgcccatggcccaccccaggtatggccgcctggtggggctgtggcggctggacggagacttccgggacgccaagtggacggaattcgcggacaaaacgggcagctccttcacccgcccgtaccaggcggtgacgccgtccggcacggaattctccatcgtcatggacaacaacaccttccgctacatgctggtgaccgggtacgtccgcgaaagccatatcatgtggaactggccgtcccgtccccacatgatcaataactcggatatcatttacatcggcgccgcttccgccgccgccaatggggacatcagcttttcctacccggacaacgacgtgacggaaagccggggcgtgcagcttctccccgctgacggcgcgcggacgaacgttctggaattcaccggagaagacgcttatatgaacgtgggcaacggactgctggcgggcagcaatgccaacgcgttcacgattgaagtgaacctggctctatccgccggggagcagaacgtcactctgtttgaaaacgacagcgtgtccatgacgctggcgtgggcggatggccattacaaagcgcgcctgcaggcgggctccacggctgcctgggaggcggacctgcccgccgtagcccttcatgaatacttctggctggccttcatccgcaattccacggcgggaacgggcgtcttttacctgaacggcgcccccctgcaaacggcggcggttgccgccggggagatgaacggcacgccgaatgccgtcgtgggccggaacctgaaggggaaaatagacgacatgcgcgtgtggcatctggcccggcccgtcaaccgtttgggcacggaagtacagcccaactggaatgaccgtctcatcgtggctcactgggggaacagcgacgtctttggccgtgataccgcctcctgggcggaacatgtccgcacgctgcgcggcatgacggaaggggtgggaggcatgcgcatccgcctgggtattgccggaggcgcgtggagcgccatgctgccggatgccgccgcccgccagaggtttgcggacggcatcagggacctgttgaaaaaatatccgctggacggcgtggacctggactttgaatggctgtaccagggggacggaaaatggaccagttacggccagttggcccaggccatccgggagaccaatccggacatgttcttttccatctccctgcataccgtcgcctactggttccccgccgcgtacatgcagtatgtggactacttcaccttccagaactacgggccggccattgacgtgaatacctataacagcatggtttccgcctgcggaaaattcaggaatcaaggctttccggataaaaagatcatcctgagcgccccattccagggaacgcccggaaccgccgggctgcctgacggcaaaaagccgggagactacatcaagggctacagggacattgccgccaattgcccggaagcggacaacccggacaatgacacggccgtctattcctattccggcctcaacctgacgctccactacaacggcgtcaccactgtcaaaaagaaagccaaatacatcagcgaccagaagctggccggcttcatgtactgggacatggggctggacgcggcggatgccgccgggagcaacaactactttgaccgccgctccctgctgcgggccgccaaccgctacgtctcctccacgtcctttcctatgacggcttcaccgttcggcttgtcccgggtgggggcgtccgttcccgccgcaggaggggcggtggatgtggaaattcaaatggaagaggaagccctgggctgggtggtggcggactccccggaatggatttccgtttccgccgcttccggcatcggccggaccacggtcatcctgacggcgttggaaaacaaatccgccgccggacggtccggaacggtggtgttccgcgcttccgacaagcaggaatgcgccgtcaccgtgacgcaggccggggcaggcctggcgggctatgacaagtgggtgcaggacaccttcccgccggacgccacggcggaccggacggcggctgatgcctcccccgccggggacggcgtcaccaacctgatgaaatacgccacgggcctggacccgctgaaaccctgcggaagcgtgacgaaggtatccgtggaagaaggcgttgaaggaagcaggcatctggtgttgcggtggccggtaaatcctcaggcggcggaggtaaagcatgaagtggaagtctccccggacctggtcaactggacttccctgggggaagtggaaaccgccggaagaacgtctgccgaattccgggatgcggagcccgtgcaggacagcgccatgaagcggcgcttcctgcgcctgaaagtgacacgggaataacttcagccgccctccttgtggaggtgcctttccgcccctgcttacgccttggaaagcaaaatccgtcccggcacggcatggccggaacagggagcgccatatacccatgcgggcggcccgaacagccacgcatggcagaatgcacgaaccttgaatgggcctcctcatcttaaaaacagggaatgtcccgttgaagaatcgcgctcgctttcctcacctcattcccagccggccgcagaggcctgcggcgctccctgctcccgcaaacccattccggggcattcaccgggcaaaggcgcagcctatttccccgccttcttcttaatcttttccttcacccgctccacattggcgcgggcgtcttcattccccagctccgccgcctgttcataccacttcctggcttccgccaggtccttggccacgcccgttccgcgttcgtacatggagcccaggttgttcatggacttggcgtcgtcctgttccgctcccttaatgtaaaactggtaggccagagccatatcctgcggagtgccgagcccttcctcatgcaggtagccgagcaggaaatacatgccgggcacggcatgcgtctggttctgttccagcttggtcaggatgtccatcgccgttttcgggtccggctccatatcctctcccttgatgagcaggcgcgccttttccaccagggcttccgggtctttggttgcggcggctttcagcacataatccttgtgaagctccttgttcggctgcacgccgatcccctgctcgtaataccgggccagcctcttgaggccgcgcacgtcctccttcttcaccagcgcggtggccgccgtcatggcggaggccagcagctgctgccgttccgcagggtcctgcacgttcccggccacggtttcataataattggccaattcgtccagggcggtcaggctgccgagttccacggcctgttcccagaacttcacggcttccggattgatggttttcggggcaggggcctggcgttccctgccggacggcgtcatccagggggggacggctccggcgtccgtcagcgtatcttccgcgttatccttctgccccggcttgcggagccacggcggggtgtttccttcctcgctattcaagctcagcttgacctgctggtaggcggaatgggaggtattccggctggcgttctgcgccgccgtttccgccgtatcctggggataggccgcctggttggcgaggaagagcagggagggaatgtggccccgtgccgccaggccgtgcatcatggcgctgtaaggctgaaggttttcattattggagctccacatgtccgccgcgtccacatggcccttcagggccccccggaacatccaggaatccccttccgccatgcgtttttccaagccgaattcgtaaataagggcgcggcccagcacgtacatgccgcagggatccccctgtccggcggaaagccgggcccaggccagggcttccggatagccggattcctcgctcctgtagctgaacagcatcaggtaggccaggtccgcctggctgcgggcgtccccttcctgagcttttttgcggaggctggcggtcagctcctcccactgttccggcgtgacgtattcggaaatgcctctcagcgtaatgaagtccccggatgcggctttcgccaggcagtcgttcagcagcgttctggcgggttccgcggccggcttgtccatcaaatccgggttttccatctgggccaggcgcagcttggccaggggatgtccttcttccgccgcctgcttgtaccacgtgcgcatgttctcctgcgcttcatgggctttgcctatggaatccatggtattggccagttcctccttccacagctcgcccagctggacgctggaatccgcgtctccaagctgggaggccagctccagctccttgtgcgttttggcataggggggaagctggttgagctttttctggggaagggaaagaggttccttcaggaagggcatgccccgttcgtcatgaagggccagcaggtccagggcggccttgcgcagctcctgctcctgtggtggcttcgcttcggaaaccaactgggcgtaccaggcgtaggcattattgctgcccagcttgcgggcctggtcaaacagggtctggagcaggtagccgtccacggttccccttttctccttcatgcagccggagaggtcgcccagcagggtttccaaatctcccctggagcgcaattccgccagaagctttccggactgctccgcggcagtacccttcgtcatctccgccagcaggcgcatggctgccgcgtgtcccttctccgcggcctgggaaaggggctggacggccatgttccgccactccctgccgtccggatcgttgccggagggcccccgcccagggaaagggccagttcccccatccgggccagaagaaccggtttggcgtttttccggtgcttctccagggactcaagcaccttgccggggtcttccttcagccagtccaccctgataaaggcaagctgggcaagcgcgtcctggtcgccggaggcggctttcttttccagaggggcgaggtagcgcttcaactcggcttccggcaggtccgtaacggtgtacagcgccgtgacggcgtccaggtctcccttctcggccagcttgcggcaggcgtccagccattccgcgtgctccggctgcatggactgcgccttgaaaatcccgaaaatcccgtaggggtccgtcatcatgagcttgggagccggatgaccggatttggcggccgcttcacggaagaaatgctgcatgtgctccaggcaggccagcggcaggtccccccggttcaggtaataaagccccatccagtactccccggccagcatgttggcccggaagtctcccgcggcagccttgccgagcaattccccgtacgtccagccgccgtccatgggcagctgggaaaggtcccggaccgggacttgctccacctgcacgggtggatttgcccctgcctgggacggaacgtcctgggcatgaaccggaacggaaaaaataaagggaataagcagaagacgggcacgcatggatcaactcttttctaacaggaaaaacctctgccctacaagcgtttttcacgtgcctgaatgtttaattattgatgatgtcacgttctttttttaaagaagacaaatgaagctgtgacgggaggctccgggcacgtgtgcggcagctcccaaggcaaaggataatgatagccgggaaaggcggaatggacaaagtaaacaagggatattaagcctcccctgtgccccttccgtccatccagtccatccggtccatccagtccggattatttaaaaaagagccccgggaggatgcgcctcactaaacctcccgcagtttttccgggcattcctccagcagcgcgcgcagccggcggcggtccagttttcccatcaccgtcaggggaatgggcgtttccatgacggcccggatgcgctgggggccgggagcagctgcattccattcgcggcacgctcgttccagcggcacagaggcgggaccgcaggcgaccagctccattccggcccgcgggtgcggaacggcctccactaccgcctccggaacacggcggcgcagcgcgtcctggacggcgtccgggtccaccagttcccccaggactttgacgagcctgtccgcccggcgcaggaaggtcagcagacgcccctccaggcgcaccaggtcgcgggtgctccaccactcctgcggctccacccgttccagcagaaaacctccaagaggctgcgtcagcaggcagccgcacagcttgccttccccctggaagcgcaggaggccgtcctcgtccgtctttgcctcccagtggggcagcagggaaaggcggtccgtgtggtacggatcgccggggagagccgtggcgagctgggagccggactccgtcatgccgtagctctgcaccacgggccagccgagggcgcgggctttcctgcccgtctccatgtccagcgccccccctcctacgatgatgcatccggcggtggaaggcgcgcggaggcgcagattgaccaggtccaccacctgcgtgggaaccagggaggaccagcaggccccggagcttttcatcaggtccgcataggcctggggattccacctgccgtgaagcgcatggacggcggtcccggccagggccgcgcgcaggtaaatcatggcgccccccacgtgccagacgggcagggggcagcaccagtccccgcattccgcgtgcaggtgttccagggctccgcgcgcgcagacgtccagggcgcgccgggtgaataaaatggctttgggcggcgaaccggaagaaccggacgtggcaaaggccgtgaccccatccatgccccggcgggaaaggaaggcggcggcctcttccgcccaatccctcaaatgggggggcgccatcacgcaggggccgttgtcccggtcccagggcaggggtgttccggaggcggacatggcggcggcaggctaccggagggcttttctgcgcagggtgtgccagcgttcctccatgcggggcttcaaatgatgctcaatccaggcataggccgcttccaggcctcctgccttgaaggtgcggcctatttccgcttccacgcctgtggcgttgccggtgcggcgcaggaaatcattgctggtgaattcgatgaaaagctttccgttgatcgctccttcctccgccagaatccattccctgacgtacagcgccagaatggcgtcccctacccatgcctccacgcggaggcgttcttctgtggccttgtccatatgatggttcatgaaaatctggcaatggcggttttccctcccagcggatccttgatgggcggcgggggcacaccgggagcctggttcccggcgggggaggccggctggcggttttcccgcggaagctccggcaggttgtccgtgggggtggatgcgggcgcgccgggcgccgggggattctccttgcggtcctgcggcgcgggggcggctcccggcgtaaggggcacgtccagcaccctgtcctgggccgcgcggcggttgaccgcatccttggcctccagggatttgcggagcgccgtctccgattccgattcccagtacccggaatccagttcaatgtaaatgttggaataggggagggacgtcttggtcttgatgaccagcacgttgaactgcttggcggcgtcttcgatcagggaattgatcgtgcggctcatcaattcaaaatgctggcgtcccggaagcattttattgatattattgcggtagcgcttgatgccgggggcgtaatcctccgtaacgctgcgcaattccgagctgatcatgatgcggggcaccacgtgggcttcctcctccagcatgttcagcacgtccagaagcacttcatcggacgtcttgtcggagaccatggtcttgatgccggctcccgtataggccgggaaggaggactccgcaatgacaatccagtttctggctcccacgatcgccaggtttttatataactggtccttccattcccgctctgccgggttggcgtcctggcagccgctgagcaggctgatgatacatacgggcaggatgagggggagtcgggtcatgggagggaccccgccttgcggggctggaaaatgggctagaatttatgggaccggggttcgcggcaggcgctggggcagcggccctgttccgtggcgaacggcgctccctgggtgggggccgcctccgtaaaggcgacgcccggcagttcagtaggtacgccctgaacggggaaatcctttcgcagggggaaataaggatagccttcccacatcaaaatgcggcgcaaatccgggtggccggagaacttgatgcccatcaggtcccatacttcacgctcgtgccagttggcggactggaagatttccgtgacgctgggcacttcctctccgtcgtccaccttcgtcttgaggctcaggttcacgcccgtttccgcctgcgtcagcgtataattgacttcaaagcgggggctttcccccatgttgtccacggagcagaggttcaccatcatgtcaaacccggcggaatcccgcagccagcggactacgtccgccacggcatggcgcgcgacggtcagcgtgatgtcgccccggaactcgtagcggtccgtgatgacgtctttcccaaagcggttctgggcgttgtctgcggcggtcttgatctgtgattctagagaaggcatggagaagaaatggtaaaagatggaacggagtaaaacggtcggaaaaggtttattcgagaggcatttccgtctcgaccggcacgggggcattggcttcgcgcggttcctccttcttgaagaacgtgcgtgcgggctgctgggtatccagcttcttgcggagggtaagcagggcttccaggatggcctccgggcggggagggcagccggaaatgtaaacgtccacgggaataatcttgtccacgccctggagcacggaataggagcggaacatgccgccggtggaggcgcacgcgcccatggcgatgcaccacttgggctccggcatctggtcccagatgcggcggacggccagggccatcttgtaggtgacggtgccggccacgatcatcacgtccgcctggcggggggaaaagcgcgttacttccgaaccgaagcgggaaaggtcataccgggagcaggccacggccatgaactcgatggcgcagcaggaaagccccatcggcatgggccagagggaatttttacgaatccagttgatggcggcgtccagggtggtgtagacaaaattgccttccgcgttggagtccagtactcctgtttcgtaaacattcggttcgttcgtggtgaccatgataacagatgattcttgctgaagccagattagcgagatgccttcaactctcaagccttaatttggttcagccatgattttctgcggcctgttccggccctgttttccgggtgccccggagcggggatgaataaacccgcacagggtttcccccgtgcgggtttttatccaactatattacctatgaaactcagaactccccataatgggtggcggtctctctacctcccgccgcccggtttgttactgatgcaggttagagtcccgggtgggggcttgcgttcaaaaaggagaaaatttttatgacaggcccatggaaggaaatacaggatgctttgagaatgaatgcatcatgtttttactgccctgaaagtggaaatagggggtagacccggtttccctgcaatgttggcgtgcagggtgcttttgggaaggagggaggatgctttatcctcggttatccctgtgccgggaggagcggatgacaaggtgcgcgactagccagaggctgagggcaatagtggctaaaagagccggcatgctttccgtgatctctcctaacaacagcacggccaggtccgctcccagaagaaggatgcccatgaaacgccagtacggggattccccgtcatgtctggcgcgcggggaaaactctgctcgaagggacgggatatccagcagaaaggaaagaaggtcaaacatggttttgtgaaaggagttggaaggaggaagttggtggatgagctttgttatcggaaggccgggatgttatggactaacttatttacaagggccgggaggcccttgttcccaaaagcgcggtcatgataggaaatccgggatgggacaattccaatgacatgcatgagaagcggtcgcctgggaacgaaggcctcccggccttcgtatctaaacttcccctaggcataaccacggcaattttatttatagtcatgattccggagggattggacaataatataagcgatcagccaaaaggcaaagaccatgccgagaacaagagccgccatgctgttcatatgtatccataagagcagagatcccatgacgattgccaggagaataatacccgtccattgacgcctccgggattgttcgtcatccctgccactcccgggaggtccaatcaatgaggataaaatatctttcaaaaaatcggaaagatcgaacataggggcacacaggaagtttaacgatgcaaattcgggaaaggaatgacgaacattacagccgttcctggatcagcacgtggaaatggcctcctgcgccgtgttcgtccgtcaggaaggcgtcctgcggcgtgttctccgcgtaggggagcaggtaatcccgctgggtcatcagggtgaccgtatcccccaggcagttgcgggaaagctccagcaggtccgtaaaattcacgtcgcaggtcaggtccgtgaggccggggtgccggtacagttcctccccggtcagcacctggtggcttttatacccgcgcagggaaccctgggggcggcggtagtaaagccgctccatttcgtccccgtagtcgatgaccgtcatgacgcccatgttccagaggggcagccagccggtgaaccagcgtgcgtaggaatcgtgaatctccagacgctgccccggctgggaatcatattccagcatgtgggagaaaagcggctgttggcggacggggcgcagttcctcccgcacggctccgtcctttacggtaagccccacttcccgccagccctcttccgtgtactcaaacacgcgggccgggaaggcgtccaccagctcgttggaaaaaatgaaggctttgccgccgcagtgcttcagcgccttttccatggtagcataaattttggcctggcttcccagcagaaggtgctggaattcgcgcagccggggggaggactccacaatcacgtaatccgtattcaggcggttccagaaccccagttgttccagaaccttgacggccagggctccggagccggcgcctatctccagcaggggcagccgcctgccgcagcgggcgcaggcctccttccagcgtgcggcgacggcctttgccagaatgggggacagcgtgggagtggtggaaaaatccccgcggctcccgatgttttcaatggaggaggaataatacccctcctgcgggtggtgcagggccagctgcatgaaggcttccagggaaagccagccgccggcggccgcgatgtggtcggaaaggcgtatcatgcgggggaaaaatgggtcaggatttggactgctccagcatgcgcagcagcggggcttccgccctcttgcgcaggtcttccggcagctccagggcgggggaaaggtcccggagagccaagtacagtttttccagcgtattcatcttcatgtacgggcaggtgctgcaggagcactgctccgtgggggcgggaatgaactccttgcccggcaccagcttgcgcaggcggtgcaggatgccggattccgtgacgatgatgaaggatgaagccgggctttccgtgcagtagggaatcatcttctccgtggagcagatgtggtcagccagcaggcgcacggcctccgtgcattccgggtgcgccaccaccagtgcgccggggtgcttctccttcagggccagaatctggttccgcgtaaattccatgtgcacgtggcaggccccgttccacaactccatggggcgtcccagctggcggcctacccaggcgcccaggttctggtccggcacgaacaggatgggacggtcctccggagcctgggagacaatcttcacggcgttcccggaggtgacgatcacgtccgccagagccttcacgccgatggagcagttcacatacgccaccacgtaataattcctgtcggcgttctctttcaggaaggcttccagttccccggcgtcgcaggaggcttccagggagcagccggcgtccgcgtccggcaggatgacggttttgtccggattgaggatcttggcggtctccgccatgaaatggacgccgcagaaggcgatcacgtcgcaatccgtatgctgcgccttgtaggccagccccagggaatcgcccacgtagtcggccatgtcctggatgtccccggtctggtagctgtgcgccagaatgatggcgttgcgttcttttttcaggcgtaaaatttcctctttcaggtcaaaaggtgccatgcgggaaaagatggggggaagcccccggcaagtcaagcatcatgtcccatgcagggcgcacttgttgacggggggcgggaaatgtggcacagtctggcgcatcatacgattatgttttcacttttagctgataaactggataacacgttccggaagctgcggggcctgggcaagatttctgaaaagaacattgcggacgccctgcgggacatccggctggccttgctggaagcggacgtggaatttggcgtggcccgggaattcatcggccgcgtgaaggagcgggccatggggcaggaagtgctcaaatccatcaagcccggggaacagatcgtcaaaatcttccgggatgaaatcgccgccctgctgggcggagacgccgtgggactggacctgacggaccccgccagaatcatggtagtgggcctgaacggcgcgggcaaaaccaccaccagcgcgaagctggccctgcgcctgaaaaacgaagggcgccgccccctgctggtggcctgcgacctggtgcgccccgccgccgtggaccagctggccacgctggcggcacagatagaagtgcccgtgtacaagcccgctcccggcagccgggacgtggtggccgtggcgcgtgaggccctggaatgggcccggacccagaacgggaccgtgatgatttttgacacggcgggccgccaggaagtggacgaagccctgattgacgagctgcgccacctgcacgccttcctctctccgcgtgaaaccctcctggtggtggacgccgccacgggccagcaggccgtgaacgtggcccagacctttgaccgggccgtgaacgtcacgggcattgtcctgaccaagttggacggtgacgcccgcgggggcgcggccctctccatgcgctccgtgacgggcaagcccatcaaattctccggcgagggggaaaagctggaccagttcggccccttcgtccccggccgcatggcggaccgcatcctgggcatgggtgacatcgtggggctggtggagcatgccgccgcccgcattgacgaggaacaggcggccaaatccatggaccgcatgatgtccggcaaatttgactttaacgacttcctggaccagatgaagatgatgcagaacctggggccgctggaaggcctgctgggcctgctccccggcttcggcaaaatcaagaagcagcttccggacggcgcgctggaccccaagaggatgaagcacatggaagccatcgtgctctccatgacggcgaaggaaaggagcaatcccaacctgctgaacccgtcccgccgccgccgcattgccgccggctgcggccgctccctgatggaggtgaacaagctcatcaagaacttttccgaaatgcgcaagatgatgtccggcaagggcaagatgggcgccatgatgaaacagatgggcgccatgaaggggaaagggggcaagatgcccggccttcccggcatgggcggcggtcttggcggcctgaaaggccttggtgggcttggaggaggcctgggcggtctctttggcggacgcaaataggcgcagaaacggatttaacccggggcgcggcgaacatggccgcgccttttttaaagaaagggcggggagcgccgcaaacccttgcgccggctgaaatgaatacatccgtcaggacgtcctgttcttgggaaaaagaattcaccgccgcccgcctttatcttccgttcccgcaggggcctgcggcgctcctcttttattgaaagaacggaatgctgctccccgtactcccggaatgatgaataaggggcgtttttaccggatggcggcgtggctggctctggccgggttcctgaacgccggcatggcggaaatgctcccggcggaggatgtgctgctccccgctccttccgcatgcacgtccgaccggtccgccgtggcgcatcttccgctgcggctggcggtctatgctcctgaaaaggatgctcccgcagtggaagccatcctgaatgtgctcaacgcccagggcgtcctgtccggcctctccatgacccgtgacagggattcggcggacgtggtgtgttcggtggaaggaaaccccgcgggaaccggagaaggatatgaggcgcgtctggaaggaggccgggaaggacggggtgtgctgcatctgaaagcgggggcgcccgcaggcctcttctacgcgtggcagagcatggtccaggtcctgaacgccaaccggaccggggaaggcttctccgtgcccgtcttctccatcagggacgtcccccgttttgaatggcggggcatcatgctggacgtatcccgccactttttcaccatggcggaggtcaagcgcatgattgacaccatgtccctcttcaagctcaaccggcttcacctgcacctgacggacggccccggctggcggatggaaatcaggaaatacccccttctcacctccatgagcgcgtggcgcgtgccgctggccaatggagaatggaactggcaggaagtgaagctggccattcaggagcatgacccggaggccacctacggaggtttttacacccgggagcagatgagggaaatcattgcctatgcccgcagccgccaggttaccattgtgccggaaatagaccttcccggccattcctatgcggccatgcatgcctacggggacttgatctgcgacggggtggactttcccgtggaagggaaaaaaggccgggacgccgtctgcatggggcgtccggaaacgctccgcttcgtaaaagacgtggtggatgaactcaaggccgtcttcccgcccggctcccccattcatctgggccatgacgaggtatccgcggaagcatggaaaaaatgcaggtactgccagaaccgtttgaaagacctgaacgagacggatctcaaggccctgagccgggacttcctgcagcaaattgcggactacgtgcggaaagacggttatgacgccatcgtctgggatgaggcaggggaactggaggcggacaaacacatcttcgtcatggcatggcgcggcaatgactttgccgcggcggcggtcagaaaggggcatcccgtcatcctggccccgtgctcccacttctactttgactactaccagtcttctgcccccacggaaccgaaggccatcgggggcctcataccgctcaggcaggtgtacggctatgaactgccggagctgtccccggaggaagcctccaaggtgcgcggcctccaggccaatatctggacggaatacctgtacgacatggggctggtggaatacatggcgtggccccgcgccctggcgctggccgaacgggcctggagcgactgcgacccgcgggactataaatccttccgcagccgtgccgccctggctctgaagcttctggaaaaactggccgtgaaataccgtcccatggatgaagaggattaaggcccctcccgggtggccgttcctttaaaagggttttcatggacctgccgcgccttttccttttggcattcccggacggctccgttctcgcgaacggtaacagggaaaacaggccggaggcccctgtctcctcccgtgcgcttctgataaaaagttcccacccttgtcaacatccctgccgggatatttccggatgcagggaggggaatttccttccgtttccgttcttcctgaccggggggatgccggaaatctgcgttccctctcctgccgcctcaacgaggaaggcgccggtttccgctcttgagcggtttgtttcctgggttttattgacagcggatgccgggtcatgtatgaaatgactctagctgattgcctgtttatgaagaaacaccggttcctgttcctcgcttccctgatggcgctcgtgctgcttggcggcatggcggtagtggcttgttccaataacttcaagcatgtgccccggacgggcttcgtgactcatcaggtaaaaaattgcgactcccatatcccgtttgatgcctactggaatgctgatgataaaaaaatctggaatgacaaggtaaacggcgtggacggcaaaaaagtcctgatggccgtcgttccggtggatacggtgcacatggatgtgaggccggataccgcggaaggatttgatgccctgcaccgtctggcggaatacttccggaagagcgtcacggccagcatggaaaaggaagttgcggaaaatccgcactttgagatggtgcctccgggaaccaggggggcctatacgctggagctcgccatcatctccatcacgcccacgaacgccaaagccggcatttttgtcacggcgttgagcggcatcaaggggggcggcctggtcaagcggttcatcaaaaagggccacatcgccatggcgggacgcctgcgggatgaggacggacgcatcgtttccgaatttgcggactacgaggaagaccacagcgccctgctgggcgtggataccaaggattttaaaaaatacgcccaccaccagcgcaccattgacgaatgggcccgtgaaattacggatgtgtattcctctacgtacgggcactggacgcagaagcgcatgatctcattcaaccccttttaagggataagcctccgcagaccgtatgcgggggaattgcccggcaaccgggtaaccgtcctgaaaggagaaccgtgaaatgcggttgaaacggcattcccggcggaacgcgtggcggaaggaatagcccgcgcttctattctccgtattccgcccaggaactgctggtctcccacacgcgcacgcgttccagggtgacgcagtcccgcacggggtattcgccggaaccttccctggccttttccagcgcatgccgggcgaagttgaaaatggtgcgggccattacctcgctggtggggtcctcccggtcaaacggaatgatgcgctccccgtacgcggccacgaaggcggcgtaattggggtcatccgtattcacgcacagggaatggtcaaactgctgtagaaaatcccccatcatctgcttgatggccttgaaatccaccaccatgtcgttggcgtccagcgtatccgcccggaacaccatctccacggaacgcgtatggccatgggggaatttgcagttgccggggtgcttggacagaaggtgcccgctttccagttcaatggatttgcagattcggtaggccatgaaggcaggatagcgtgggaaggggcggggggcaatcccaatcagagtctgcctgcggtccggttctctgtgtgcggaacggggttcgtaacggattctgccggccgtgggcggcttttccttgcgggcggctgtgatttctggcaaccttcggaaaaccagactcttgccctatggcctatctttcatggtccttcctgaaaatgggagaaaaatcggatcgcaggacaagcctccttttcctgctcatggcgggcattcccatcatttttaccgccttcttcgtcttcatgctgggggcggccacggtctggtacgcctggcctgttctgctgccgatgcttctcctcctctatctccccttcgccctgcggaaggaaaaggtgcagagcgtccattccaggaatatcctctttggccgggacccgctgacagtcgtcttcaggccggtggtgaggaactgggtatatgccgtttatgccgtgcttccggcgttgcccctcctgttttctggttggaaaatgcccctggacagtctcgggaacggaaggaatctggcggaattcttcctgatgtggatatccctgtatgccgtcttcacggtgctgacggttttcctgggaaaggcacggtatttgaagccgggcaggctgctgctggccgctggcgccaatctggcgctgatgctgctttattccctgcttgcgtgaagcgggcgcactgtgtatccggcgtgttctccggccttcccgtggacgggggcttttccgtggcgcttgctgcaatgggggaaccgcgttgccctgccagcctggcggccatctccggagttgttggaatggacgtgctctattgccgttctttccctgaaacgcccgccccgggcatgggagaatggcgcggaaagacaggaatactctccgggacggggaaatttgctgaaattgaaaatcttgaaataatattgtttttctgtaaaatctccgcgccgggttgatcccggattaagaaaaggaggtgtaccatgtgaatgactgtatcatactaaccaggctgattgagttactcattgtaatgttcagctaacgaaaagccccgtcctgtagcagcaggacggggcgatttattagaggtaaatgtgatttgtatgatactaaccggagccactatgaaaaatttccataaatagtcaagcgggaaaaacttccggcaatgtcttacaaacggttttttaaaggctggagattctccctgtaacgggtggcggattccacctgtttatatctgcgcttcttcctccttccggatttaatgaatgcttgaaacggcaggccggggatattcggaagaatctacccaaaagctcaagggaaaaaggaggggagataaaacgagttttcccgtaaagggaccgtaaaaaatccctgttccgcgcggcatggcggaacagggagaaaaaatccggcgctctgtccgggcggcttaatgggcgcagccggcgcaggcccagccttcgcggatcttcgcgaagaaatcgttgcccttgtcgtccaccagaatgaaggcggggaagtcctccacctcaatcttccagatggcttccatgcccagttccgggtattccagcagttccaccttcctgatgttattcttggccaggatggcggcgggaccgccgatggaacccaggtaaaagccgccgtgcttctggcaggcgtccgtcacctgctggctgcggttgcccttggcgatcatgatcatggagccgccgttttcctggaacaggtccacgtaggaatccatgcgccccgcggtggtagggccgaaggagccggagggatacccttccggggtcttggccggaccggcgtagtacacggggtggtccttcatgtactggggcatgccttcacccttctccaggcgttccttcagcttggcgtgggcgatgtcgcgcgccacgatgatggtgccgttcaggctcaggcgcgtggtgacggggtacttgctcagttccgccagcacttccttcatcgggcggttcaggtcaatggagacggcctcgctggaggtcatgcgcagcgcttccggaatgtactgtccgggattggtttccagctgttcaatgaagatgccttccggcgtgatcttggccttcgcgttgcggtccgcggagcaggagacgcccaggcccaccgggcaggaggctccgtggcggggcaggcggatgacgcgcacgtccagcgcgtaccacttgccgccgaactgggcgcccaggcccagcttgcaggcttcctcatgcagttccttttccagctccaggtcgcggaaggcgcgtccgtactcgttgcccgtggtcggaaggttgtcgtaatacttggtggaagccatcttcacggttttcaggcacttttccgcggatgtgccgccgatgacgaaggcgatgtggtagggcgggcaggccgccgtgcccagcgtgctcatcttctccaccaggaacttcttcagcgtggccggattcagcagggccttcgtttcctggtaaaggtaggtcttgttggcggagccgccgcccttggcgacgaagaggaaggagtacttcatgccttccacggcttcaatgtcaatctgcgcgggcaggttggtgccggtgttcttctccgtatacatgtccagcgccacggtctgggaatagcgcaggttgttctgggtgtaggcgtcgtaaacgccgtgggaaagctgttcgcagtcgtcgcagccggtccagacctgctgtcccttcttgcccacgatggtggcggtgcccgtgtcctggcagaagggcaggattccggcggaagccacttccgcgttgcggagcatcgtcagggccacgctcttgtcattggcgctggcttccgggtcgtccagaatggcggccacctgcttcaggtgggcggggcgcaggaaaaaggccacgtcatggaaggcttccgcggccagcaggcgcaggccctccggttccaccttcagcatggggtgtccttcaaagtcacccacgctcacgtagtcggacgtgatgaggcggtactgggtgtcgtccttttcaatgggaaaaggatcctggtaatgaaaatccggtgttgccataacgggaggcaatatagcggagcgccgcccccggttcgagcaaaaaaatcaggggcggttcaggcccgaatcaatcattaaaaaaggcttctgttcgcccagcgtacggaaaggaacgcagtttttaaagaaccacgggctgacggaaaacagcatatccctgaagacgtgatacaggaattcccggtgcatgcgccgttcctcttccggagtgaggatgtaaatgacggaaatgggctgaatgaatgtgatcacggggattccccacatctgcagcaagctgtctctgatcttgaacatctggtgaaccttcccctgaaagacaatcgccacggccacggttcccgcagggcttgcgtccatgaaggcatgcattttttcccatgcacggggcagcagttggcaggtaatcgtgccgtcctgctcccgtgccgcgtaccggatatcctccgggccgatcagggattccggccggataaaggcccaggatggaacaggctccgggaaatcagggcgggtgtaggggatggagcggaacccgcttttcagatgaatggttttcccttgccggagttccgggaggaaccgctgttccagctccgtgctgcggggatgcacgggataaacggccagcttctttttcaccttcctctgctgttgttccgtgagcggcggaaactgggtattgatggccgcgcagagggcatccagctggcggtcatctcccggcacgggaatgagggtggcgtgggaaggcattttatggaatacgggcgtagacaggatggcgccgcgcaggaccacggccattctgtccttgccgggccggagggcggcgcaggcctgttccaggttcctgtacgcttcttcattccaaacgatgtccagatgccccggataatccagattggggcgtgcggactgggcgtaatccccggtgacgatgggggcgttccccagaaacaggtattccttctccgcgtctttttcttcctccgcgcccgggcggctccagagccggtagcccggtacggaaagcgtcccttcttccaccagccgggcgttctccggatggatggcgtacagggccagatcacgcggaatgaaaggggtggttttccccgtggcggcccggtggttgagcagttccgccaagttggcggcttcattctccccgtccagtccggaaatttcaaaagcacgggaaataatggcctgaaccaccggggccgaattgacttttccctgaacgacgacagccagcctgtcatgtcccagcctcatggcggatgtagccgttttcatggccctccctcccggcgtgttcagggtgatgttgagatgctccggtctgctcggatcgacgcctgcccgttccacctccgcctccgtaatgaccggttcatctttcaggaacagacgttcccgctgcatctttccgtggcggtcgcggaattcatacacataaggcgtgtatccttccggaaccggttttccttcccggtccagctccaggctgtccggatgcaccatcctgacggcaatggagggaacggccggcggagccgcctccgcacgggcggaaagcgggagccagaaggcggaaatgaacagcaggcagagtagttgtctcatggtcaatatgatagaacccctctaacacgtcaggcaagaaaaaagagcggacgggagcggcgcaagcccctgcggtaattaatatccccatcgtgccctgcggatacgcgtattttaaatcgtttgcggaaacccatcccggtttcagttgccgcaagtgtttgagccgttcccggggccttgacaggaaaatcccccggaaccgcagggagccgggggatttcagccgaagaggggctcagcgggagggcggtgtccctgcacggggcgcgcctgccatatccgccatgggttattgccgcggcttgcggcggggagaagaaggttcggagaatgaggaactggaagaggaggaaggcctgggagcgccgtactcctccggaatttccgctgccagagggatgtcgttcgggaggctgctttcgtcgtcgtaataattcttcatcctcttctgggcgtccttgatcagggtggcttccgcccattcctccaccgtcatgttgtctcttctggcggcttcttcgatgagtttgtaatcctcggcgctcagcatgacggcgaagggtttccaatgggctcttgccgcctccttcagttttttctccctttccgtcttttccatcatgagccggatgagagcttccttgtctttgggaatggctaccttggcaagccagttgcggaccgtgttgggagacacgaagcattcctccgcaaaatcattgcgggagatgttctgctgtttcagccaagccttgatctgcactttgagttcatcctgattctcactcatgcatatctttgtaacgaaaatggtgcgatttttcaaccttttttgcataatatcattttaacggtatattttcgttgactgaaataccgtttcaggtgcattattgcatcgtaagcgggttattgaagcccttattgcaccaaaagaaggatttttatgaagacgggaaataagaaaaagagtcagaaaaaaattcaaatcaagggaaaaatgccgttatccgtccattttttccgggatgcggaagcggacgccctcaacgtggagcgctgccagcttgataaggctaccctgattgcctgtgccgtcaaacgtctccgggaagatctgggcaacgtcccggattccggtaaaaaaccttccgcatgactcaggagatttactgggaacttctggcgtggctgttccgctcttttctggcggtgactaccttcgcctttgtcgtggccgggtaccaggccctgcgctgccgtccgcgggacggcagcaagcggagaaagtagggaatggcaaaaaggtccgcgtttccccggcgtcaggccggggaggacgccggggaggttgactcacggcttcgtctcccttatcttccgggaatgtcccgccgtgtttcggatgaagccgccctgtccgccatgagccttgaagaactctggcgcttgtttcccgtcatcctgagcgaatccaggccggagtgggcggaaatctaccggagggagaaagagatgctggaatcggtggtgcccctctcgcgcatcagccgcctttcccacttcgggagcacgtccgttccgggcctggcggccaaacccaccattgacattctgctggaagtgcggcccgattcatttgtttttgaaacgcttcctctgctggaaaagtgcggctaccgggaaatgcaccgggacgaagcgcagatgcgcctggttctggtgaagggctatgccgcggacggcttccgggggcaggcgttccatctgcatgtgcggccctgccgggattgggatgaattgtacttccgggattacctggccgcgcatccggatgaggcggaaaggtacgccgccctcaagcgttccctgaaagagaagttcgaattcaaccgggatgcctatacggagggaaaaacggagctgatcgctgccatgacccgccgggcgagggaagaaatgcccggcaggcacgtcccggcataaggccgttaaaccgggttgctttttatagggcaggggatgcgcggaaagacggaaggaaagggcaggcggacattccaaacttgcttgatggtgaaacttccattgtcgtccacaagggcatggatttggcacgacctttccggagggacatctgctttgaaccaccctttccatgtttgggaaactgcccaaagagcggaagtctaatttttatccttccgggcaatactcgcccgccgcggcattaaaaagcctgcttccggctgttcgcgccatggatacgtttattttggtggcgggaagaggattaagccggttggaaaggaaggcctttccgggggtgaaagaaattccgccgcttcccgcagcgtggatgaggctgaatgacaggcatgtttttaaggtccgctccggatggaaatccgtattgccagaagtggggaatggcggtaacattccgccgctatgagtattgagagtttcgcaaaccagcatgtgctggaattggtggcttaccagccgggcaagcccattgaggagacggcccgggaactgggcctggatccccatgatattgtgaaactggcgtccaatgagaacccgctggggccgtcccccaaggcggtggaggccattgcccgcgcggcggcaggcgtgaacatttatccggacggcgcggccttccgcctgcgctccgccattgcggagttctgcggcgtggagttcggccagacggtggtgggcacgggcagcagcgaggtgattgagctgatgtgccatgccctgctgaatccccgggcggaggtagtggccgccaggcacgccttttccatgtaccccatcatgtccaagctgttcggcgccacgtacgtggaagtgcccaacaagccggactggacgcacgatctgaacggcttcctggatgccgttacggacaacacgcgcatcgtgttcatcacgaatcccaccaatcccgtgggcaccgtcgtgacccagcaggagattgacgatttcatggcgaaggtgccggaacacgtgctggtgtgctttgacgaggcgtaccgggagttttccgacaatccgccggataccctcaagttcgtgcgggaaggccgcaacgtgattgttctccgcaccttctccaaggcttacggcctggcgggcctgcgcgtgggctacggcattgccccggaacacgtgtgcagcatgctgcacaaggcgcgcgcgccgttcaacctgcacgtgctggcgcaggaggcggccctggccgccctggaagaccgggagcacgtgcgccgcaccgtggagaacaatgccgagggcatgcgtttttacgaacaggctttccgggacatggggctggaatggattcccagccagggcaattttgtcctggtgaaggtggggcagggcaggaaggtgttccaggacatgctggccaggggcgtgatcgtccgcgcgcaggacggctacgggctgccggagtggatccgcatcagcataggcacccccgcggaaaatgcccgctgcattgaagttttgaaggaagtactttaaacagtttcaccgtttttcctgtctcaccttttatgatctctccggaacagtacattgacggtcttgaatggcgttacgcctgcaagaagtttgaccccgaagcccgcattgagaaacccacctggcatgcgctggcggaaagcctgcgcctcagcccgtcttccctgggccttcagctctggaagtttgtggtggtgacgaacaaggaattaaaggcgcgcctgcgggaagtctcctggaaccagtcccaggtggaggactgctcccattacgtggtgctttgcgcccgcaggacggccacccagcgggacgtggaccgctacctggcccagattgagttcacgcgccacccgtccgcggaaaagctggcttcctccgctgatttctatactggctatgtaaaatccctgactccggaaaaaatgcacacctggctggattgccaggtgtacattgccgcaggcttcctgctcagcgcggccgccgccctgcgggtggattcctgcaccatcggcggcatggaccgctataagtatgatgagattctgggcctggacggcacgccgtaccgctccgtggtgagcgtggcgctgggctaccgcgcgaaggacgacgattacgcccgcgaggccaaggtgcgcttccccgccggggaggtgatcgacatccgcgcctgatttctccttcccttttccccctgtccggggccggatttcctgattggaggtccggcccctttttttgtccggcagggcgtttaccttccgggcgcatggtctttttcccgcgtccggagcgtgcctgttttttaatctcgccaagaacgggatgtttgagataataacttgcctgaacaagattggccggtcctcccgggcccggcggttttccttcatgaaacctgacgcgcggcaatccgcccggcggaatgcctgcccggacggcggaacgaaggagaattcacccgctttttcccctttccctgcaagaaaaggacggcgggcgcgtagttcttggcacgaaccagatcctccttttccctgaaacgacacgataacatgaagaagaacctattcctgatgatcgccgcttttgccgcatctcccttgatggggcaggacgccaagcagattgcggattccctcaccatccctccggtgaaagcgggcgcaaaacaactgccgatgccaagcgcctccggagcccagatcaaatccctgggggccgactatgagcagcttgttaacagcaagggaaagatagcccccgttatttcagacacccccgtcaacgtcagcttcaaggtgaccaaggacggcaaggaagccatcagcaaggattatgaaatcatgctgcaggccccggacgccgcccagggcaatcccaagccgcgtatcattccggagatcctgcaatggaagggcggccagggcgagtacaagctggggaacacggtttccgtagcctgcccggaaaaagagctggcgcagatattcacggctgatctggaagacgtggcggggaagaaggtcaagcttgtcccgcccggcgcgaaggcggatatttccttttccctgctgaaaggcggcaacctgggcaaggaggggtacaggctccaggtgaccagggacggcgtccgcattggcgcggctacgcccaccgggctgttctggggcacgcgcacgctgctgcagatgctgcgccagacccccggcagcgttccctgcggcacggcagtggatttcccgcgctatgagctgcgcggcttcatgcttgatattgcgcgtacgccctatcccctcagctacctcagggacgtgatccgcaccatggcctggtacaagatgaatgatctgcacctggtcatcaacaataacttcattttccatgaaatgtatgtggacaagggccgcgatccgttcaaggagctctatgctgccttccgcctggaatccaacatgaagggcaaggacggcgttcctcttacggcgaaggaccttttctacaccaagaaggagtttgcggatctggtggattacgccgaacgccgcggcatcagcatcgttccggagattgacactcccggtcacgcgctttccttcacccgcctgcgcccggacctcatttacaagggacccatgaaccatgaaaagcgccgcagcgagatgctggacgccgccaacccggagacgatcagcctggtgggcaaggtatttgacgagtatttgctgaaagaccccaaactgggccgcccggtgttcggcagcaaggtggtgcatgtgggcgcggacgagttttacggcaacaaggaggattaccgccattttgcggacgccgtgctgaagcatgccctgaagcgcggttatacgccccgcatctggggcagcctgagcaccaagcccggcaaaacccccgtggtgagcaagggcgttcaaatgaacctctggagtaccggatggatgagggcctgggaggccgtgaaccagggctatgacgtcatcaataccaatgacggcgccctgtacgtggtgccctacgccaactattaccgcatggacaggaaccacaaggggctttataataactggattcccaaccgcatcgggaatgaaaccctgccttccggccatccccagctcatcggcgcggcttttgccgtctggaatgatgagacggacctcaagcactccggctatgccccctatgacatttggggcgttatttccggctccatggacgtgctggcccagaagatgtgggggaaggccaaggctccggattcttttgaagagcaccgggagctggtcaaggccatcggggaagccccccgtaccaaccccctccacaagtggaaggattccaagcccttctccgtggttccgggcaagctgccccagcagttgaaccagcccgccctggggcccggctaccgcctcaccatggagcttgagctttccgccgctccggaagggaaggagcaggttctgctttccggcccggaaggggagctgttcgccgtcatgaaggacggcaccatgggcttccggcgggatgactctctggaattctccttcggcgccaagctgcccgtcggcaagaaggtgaaggtggaaattgtgggagagccggaaaaaaccaccctcctcattgacggcaagcctgcgggcaccatggtgctcaagagcttccgcaatccggacgaaaactttgaaccccgcacgaagggcgtgcgctccaccttcgttctcccgctgaaggtgctcggctcctccttccaggggaaggtgtttgatctgaacgtccagccgttgtaacggcccgtgccggaagcggcgcgggccggataatcccgggcggcttcttccggagccgggcggcctcatgcgccgcactctttccagcgccccgcagtctccggacttgcggggcgttcctgttcccggcgccgttctggagcgccggagatggggaagttccgcgcagcggttcagtcccgcatgcccctgtacctcatggggcggtagccgctgttctccagcatggggcggctgaaaacgcgctccgcgcacttccagaccggcagggggccggcttcactgcccaggaacctgtctttttccgctccctcccagcggatgaacaggagcacatggcgtcccggagcaatcaggatgtcccccgttttcagctcatcccaggaggggagggaaatggaaagaacggggagctcccgtgtggaaaatggcctggacaggcgccagcagcgggagacgaagccggagcagtccaccccggcggcaaagcggctggcggcggcatcccccgcggcctgcttttccggggtgcccatgtccccggccgcggcgggggagcccccgttggcggcatccgccttcaggcgttcggcgaactgccgcggggtgtcgaacccgccccatttgtacggcatgccggtggaacgcgcgccggggcgccaccacgcgccggcatggcctccggctgcggaggcgtccggcgtatctatccggatgccgtcctcgtccgtcccgtggcggacgttccggggagagccccgccaggccatggaagtataggcccggctggtttccagggcttcacggcgggtgacggaagaagcgggaggcaggatttccggcgcgccgggaacacaggcccccaggcaggcggagagggtgagcagcgtcagggtgttggtcatggactgcatgtgtagccacttcccgccgcggaggcaaggatgattgcaggagaacgctttttattcggaaaacgaacggtctggaagcttgactaccgggtggaatatgtgaaaaaggggttaactgaggcggaaaggaatggaagaggtttccgttcgccctcccgcttcccatcgccttgcattttttatggacgaagaacaacaaatcatccaggagccggttcaggaacccgcccctgaaaaacagcccgacaagacccaggccactcttacggcggtttctccgctggtgtccgtctttttcggtttctccaccggcgtgaacatcattccgcccctgatctgctggctggtctggaaggatgccaaccccctggtggacaaggtaggaaagaacgttctgaatgcccagatttcctgggcgatttattcgattgcggccttcctgttatgttttgtcctgatcggcttcgtgctggctcccgcggtcgtcatcgcgtggattgttttcgccattatcactgccgtcaaggtggcgaacggggattacgattacgtggcgcccctcacgattacgttcctgaagtaacgttttttccacttgcccatttatgaaaaagccgccggcattctgcgccggcggcttttttgcggaatgggatccgttttccggagaggttcagatgggcatgtccttttcactgccgccgtacatgaacgtatggagcaggcgcgtgacctggttctgttccgcgcgcagctgggcggaggggcgcagcgcggcgtacgtcaggctgtcatgcccggtgaattccctcatgtggaagccctggaagctggtcatgggttcgctgtcatggaagagcttgcccctccggagcagttcgtcaaagacgtgttccgcctcccgcgtgcgcgtcagcgcgttttccggatggggcacgcggatgaccagcgcgccgccgtccccgcggaagttgatgcccgctccggccatgacgtccgcggaaggctggctggtaacgctgcccagaagcagaacgccgtcatctatcaaatggatgcggctggcgtgggcttcctccttcacgtgcagcacgccgccgtaaatgtgggtggatacgctgccggaaagttttttgatgcgcatcaggccgtgcttgatgacgagttccgagccctcggcgggcaggtccacttccgaggcgaagagccagccgtccgtcatggcgattctgccttcatgctctctggagccctgaatgcggccctggcccatcagaaggcggccgccgttgatctccaggctgccgttggccttgtttcccaggaaaacggtcatgtggtccggcaggttgcccaggagcgtcatggtgcctccgttacggatgaccaggtgggcggtgcggtgcccgtggtccggctggttggggcctcccacgtaaacgggggcgttgatgatgtaaagattgccgccggaatcaacggtgagggaatcctgaatgtccgtctggccctgcaccacgtcattgctgatggtgaccgggcacatgtaggagacgcggttcatggatgaggctgaaagcggcatcatccctgttagaatgaatgggttgatattgctcatgacgctggttacatagttggtttgacgtttgaggcgcggtggatgcgcgccaatggtattagaccgtccgggcgggtaaaatgttcgggtaaattcaccttattttcttccggacgggaaaagcgcggttcactcccattccacccgggtcagttccagttcccgtccccggaggatggccagggcagggtctccgcagccggggcagatatagccgtgctccgtgaaggaaaaatccgcgctgcaagcgtcgcagcggcacagggcctccacccacgtgacgtccagggcggcgtcctgcgcggcatacgcgtccttcagggccaggaaggcggattgcagggcttccggcaccacgccgctcaggctgccgatggtcatgtgcacgcgcatcagccgggttcccccgttcttttccatgagccgccgggccatgtccagcgccccctccatgatgcctacttcatgcatgcgcgtctttccgggcctggtattcctccagggcgcgggcgatgagggtttccaccaggtccagcgcctgcggcacggcctcccgcacttccgcggacatgggctggcagaagtccgtatgcccggcctccacccccaccagcgtgatgatgcgcggcagggttccgcacagctgggccgcgcccagcacttccttcatgccgatctggtgcggtgagatgacgcgggagaaatggcgggggagttcgtcccggctgcgcgtgacgacggttccgggcggggcccccgtcttgacggcgtccagcaggatgaccgtatccgcgtcttccagcaggggcagcagggtcattcccagcgtgcctccctcctccacatggaccagcgggccgtagtcccgttcctgaagacggtgggcaagctccacgcctatgccgtcatcccccatgagcgggttgcccacgcccagcacgagcacgggataggcgttccccttcacggggcagccccggagttcttccgtgtatggctccaattccatggcagatgcgggggaagggttattcatcccggaatttgacgcccttgcgcagccagcgccctccgctgaacatggaggagatggtgccgtcccggtccacgtttccggagaggatggaaaggtacacgtgaaccatggcgaagatgatgaagcaccacatgccgatcaggtgcaccaggcgcacgtacggaacccctatcaggtcgttcaggggcatgaaccagtggtagaaccagtggcgcggctcatacagggcgtacagggccagcccggtcaccaccatggtggtgaacaggacgtagacgcccgtgtacgtccactgctgtaaaggattgtggccgatgtagcgggggccgtcataactgcgggcgaacacgtagtccaccgccgtggtgaagaggtccttccactgctgcctggagatggggaagagggcccggaagctctggtacttgttggaggccatgaagaagcaggagaagcgcagcatcatcaccaccaccagggtccaccccagcgcgtagtgcacgaagcggagcgtgccgaactggaaggccccgtgcaggtcccccattttcaggaaccacccttccgcaatgcagatgccggtggaagccagcccgatgatgcagaacacccaggtccagtgcagcacgcgcagcggccagtcccagacgtggaagtagcggaaattggccttggccatggaaaggcggcgcacgtccctcatggcgtgcatgggcaccacgcccagcaggcgccacggcgcgccgggccggtggacggccacggccacgggttcaaagccggagggggagtattcctcaaaagccttgttcatgcgctctttttccagatggctgacttcacacagcttttccagggccttcaggctgccgcgggccaccatgaagggggtggcgtcctccttgtccgcggctttcagcatggccgtgctgtacggcctttcccgggagggcgcctcccaggaattctcctgctgggcgtagggcagggccacgccccgttcccgcgcggcgtggagcagggccaggtcccccgggtccgtgctgccgttgggggaggcgcacacggccagggccaggatttcctccggcgtgtaaaccgggctggccggaatggcgtcctccaccgccagggtgaggtctttgtcgataagagtcgttttcacgggtcctgtctggtcagaatggcctccccttcttcgtcaaacaagtggacggcgcaggattggcacgggtcatagctgtgaacggtgcgcaggggttccaccgggcgggtggggtccaccagcgggtgttttccggtatgggccagggaatattcgtacggccccatctgcccctccgcgtcgcggccggagctgttccaggtgctgggcaccacggcctggtagttcaccgtctggccgttttcaatccgtacccagtggctcaggctgccgcggggcgcttccacccagcccacgcccttgcaggaggagggccaggtttccggctcccatttttccgggttgaaggtggcggtttccccattcttgatgcggtccgtcatctcctggagctggttcaccatcatgtccacgttgatcagggcgtccagggagcggccgtacacgcggcccagcgtggagttcaggaaggcgttgtcacggggaatgcccagcttgtcgcaggcggcgtccacccgctccacgatggcgggcaccccctgggcgtagccgatcatcatgcgggcgttcgggcccacggccatcgcgtggccgtcgtagcgcggggctttcacccaggtgtactgcggatggtcggagagccacttgtagggcggcctggggccgttgtaatccgcgttcgtctccccgtcgtacggggccaggcccgcatcccggccttccgtgtacttgtaccaggcgctggtgacgaattccttgatcttgtcctggtcaaagggaagcacgtttttatagtccccgttcagcaggacgccgggcttgatcatccccttgccggcgggagctccggtgttgatctcggacgggtccccggtgcagaaaaagttggggttggacgcgccgatgtgggcgtaatccttgtaaaatccggcgatggccacgatgtccgggtagtacaccttgtggatgaagtcgtggcaggtctgcaccagctgtttcaggtagctcagggcaaactggttgatggcctggtcattgttcatgttgatggcgcaggccatgccgcccaccaggaagttcgggtgcgggttcttgccgcctaggatggtgtggatcttgatcatgtcccgctgccagaccagggcctggagatagtgcgccacgcccagcaggttcacctccggcggcagcttgtaggccgggtggccccagtagccgtttgtgaaaatggagtactggccgtgggcgatggagtccttcagctttttctgcaccccggcaaagtacgtggcggaggacaggggccagtctgaaagggatttggcgatggcggcggtttccttggggtccgccttcagggcggacatcacgtccacccagtccatggcctggagctggtagaagtggatgacgtggtcctggatgcccagggcgccgctgaccaggtcgcgcatgaggcgggcctggacgggaaccgggtattgcagggcgtcctccaccgcggccagggccgcaatggcgtgcgtgcccgtgcagacgccgcagatgcgttccacgaaggcccagacgtcccgcgggtcccgcttgcaggcgatcacctcaatgccgcggtactgcgtggtggaggtccaggcgttcttgatgacgccgtccccggcctccatctccacgcgcaggtggccttcaatgcgcgtcacggggtcaatgaccacccggctggattccggaacgtccgctgatgtgtaattgctcatggtaatctggtggtgaaagcttctggttattcttcagtttccttgtcgggcgagccgggagcgtccccgaaggcgggcagggagacgttcgcctcctccttcatgtgctgcttcttgtaatggatggcggaacctacggcatgggcggcgatcgccgcgcccgcgccggccacgcccacggccccgatcacgttggcggaggcctccacgccgaagccgttcacgttgggcagcgtcttgtagaagggggtcatgcggtcaaagaagtacagctccgtgcagccgatgcacgggtggccggactggatggggaagctgacgccgccgttccacttcacgatggggcagggggaaaacgtatccggccccttgcagcccaccttgtacaggcagaagcattcccgcgcgttctcatcgtcaaacacgttgacgaactggccggcgtcaaagtgggcgcggcgcgggcagttgttatggatgcgggtgccgtacgccatcagcgggcgcgtctccaggtcgcattccggggcgcggtcaaaggtcaggatgtacatgatgacggcggtgatcacgtccccgatgggcgggcagcccggcacattgatgaccgtgcggtccgtcaggatgtcccggatgcccacggccccggtagggttggggcgggcggcctggatggagccgaagtacgcgcaggagcccaccgccaggatgtaggaggcgttttccgcgcagtggcgcagcatgtgctccaccgtatccccggccacggtgcagtacacccctccgtcgttgaccgggacggaaccgttgatgacgaggatatggggttccttgatggcctcttccagggcggcgttggctgcgtccccggagggggccatcagcagttccacgtaaggcatggagacggcggaaagcaccatgtccccgatctcctcgttatagctgcggatggtgctttccaggcacccggtgcattcctggagctggagccagatgaccaccgggcgtttcagggcggccatcttgtccgcaatctcctgggcgttggaaacgcctcccgtcacggtggcgacgcccatcagggcgatcattttcaggcaccatttattgaattcgcgccggctgacgccgcggcgctccatgtgttcccccagggtttccccgggacgccatgtggttaaaatctcatgattcagggaggcctgctccgcctcctgcatggaaggttgctgcgtgcgcttcatgtgcgtggtccaaataaatcgttttcatttagacacgatttccgggaaatgcgatcaatattttccaatttttcaggggctgcccctaccaggaccagacgttctggatttggaaaaccacggccgtctggcccctgcggccgttgacgggattcttgacgagctgaatgtcaggctggagcgtcatggtgggcgtcacctgggccacataggtcagttcaatgccgtattcattcttgttcacgtacggaccattctttttggcgccctgctgccagaggaagcccaggcccaggtagccgtcattggaggcgccttttccgcggaagggggagaggagcaccagccccgtggtggccgcgcagcgcacgccggtcagcgtggcggcgtcatcgctggcccagccgccgcggaagaaccagcccaggtggctgctgcggccaagctgctgctggaagttcacggccacgccgccgccgttttcactgttgctggtggtgaagaagggctggaggcggtacacgccggaacccatgccgcagaagtcctccgccacgtagccgaattcaagcacgttcgtccagttgtccgagttcaggttcctgaacgggttgtggttctgggtcatgttgttggcggcggtggctcccatcacgtaaaaggaggtggtgggctgccatgcgaaatggaagcccagggagttgtccgtcaggggcagcatggggttgttgccgaagacgctgttggtcaggttattgttgtgtgagttggcgtaggcgttgtggtccatgtaattggtggtgtccagctggcccgccatcagcaggagcttgccgcccgctcccacccatgccaggctcaggttgctgaggtgggggtccggcccctggaaggaactggtgggattctggagggagcccagcgtggtggcggggcccttgctcccttcattgaagtcaaagccgttgccgaagtcgaactcggaggccaggtacaggccgctccccgtggagttgttgcggaaaatggtaatattggtcagcagggagccgttataggaggggaaatccgtctttccgttcaggccgccgcccgtcagtcccgtgtagttgaagccgaactgggcggaataggtgatgccgtatctggacagggcggtcttgatcttctgcgccccggtggaaatcatgtcttcacggatccaggcgttcggttccgcgcaggtgttgccgaagacgtaggaactgtccagatacggcatcatcttgagaggcttggccgcaaaccattcaatgccgggggcggagggcctggcctcatgctggagaagaacgctgggcctggtgggaacgccgggcgttctcttggtgatttgttcttccggccgcatgcccttcagcaggctggggcttatttccctgccttccagggttttcacgcgcaggccgcgttccgtgttcaggtagggaggcgtggtcgtcactacgggtgcgggctgctgggccaggacgggatcgcaggaggccacgacggcgacggcgcacaaggagggaagcatgacatgtttcatatagacaatcagacaagacagcagacggaagtgtcataactcaactgaaatgctgacacgaatacctgttttttcccgcctttcctcaaaaagggaagactgcccctcccgccgcctcattcaaccgggcatgagcaagcaggtgcggttctccgtttcctggcgtccgcgccgccgtattccaaacagcgtggagggggaggaaggaggaaaggcatgccccctgttccgtcccggattcccttggttggcagttggccgtggaaacgcttccatagaagaacgggaatgggaatatgagagaaggaagggagggctttaaaggtaaaaaggctggttataaccggggctcctgtacggatttcaatagagagtggagagtggagagtggagagtggagagtggagagtggagagtggagagtggagagtggagagtggagagtggagagtggagagtggagagtggagagtggagagtggagagtggagagtggagagtggagagtggagagtggagagtggagagtggagagtggagagtggagagtaggggcgcaaagaaaaaggcggagaaggcagaaaaaaagagggccgttccgcgctggggaagcggaacggcccttgaaggtaaagggaggcttgggaaagccggaataggggggttatttcacggcgatcgtctgttcgcggtcggggcccacgcccacggtcgtgacggggcagccgatgagctcgctcatgcgcttgacgaatttcctggcgttttccggaatctcttcccaggaacggcaggcggagatgtcctgcatccagccgggcaccgtttcatacacgggcttgcagcgttcccattcgtccaccgtggcgggcggataggccaggatttcaccgtccaggtcatagcctgtgcagattttgatttccgggcacttgtcgtagccgtccaggttggtcatggccatttcgtcaaagccgttgaacatggcggagaagcggagcagcacgccgtccgcccagccgcagcggcggggacggcccgtagtggcgccgaattcgcggcccatgctgtgcaggtggttggagatttcttcatcttccgtgacgaaggggccggaacccacgcgggtggtataggccttgcacacgccgatgatgcggtcaatcttgtgcggcggaacgcccgtgccggtgcaggcgccggcggaagaggtgttggaggaggtgacgaacgggtaggtgccgaagtccacgtccaggtaagcgccctgggctccttcaaagaggatgctctttccggaggccacggcttcatgcatgaccgggatggtattggtgatgtgggggcgcagcacgtccgcggcggcagtcacttccgccaccattttttcttcatccatggagggaaggcccatgcgttccatttccgcgttcgccatcttgatgcggcggcgcagcacttcgtcaaaaatcctgggatccctcatgtccgccatgcgcacgcctatgcggcgggccttgtccgcgtacgtggggccaatgccgcgcttggtggtgccgatggcttttttgccgagggcggattcctgggcggcgtccatttccttgtggaaggggaggaccacgtgggcgcggtcggagatgagaaggttgtccttcgtgatggagacgccctggccgcggagctcattgatttcctccaccaggccgatggggtccagcaccacaccattaccgatgacgcaaagcttgcccggccacaggatgccggaggggacaaggtgaaggatgtacttcttcccgttggcgattacggtatggcccgcgttgttgccgccctggccgcgtgccaccacgtcggcggattccgtcaggaaatcgatcattttgcccttgccttcgtcgccccattgggagccgataataatggtattcatgataaaaatggaactcggagaccttaatgagattcccgccttatggcaagacaatcttacaaagttgttaagttttcctgataagatgagtttgaagaagggaaacgttccggggagcggagcggggaggatgagcgtggctgtgccggattctccgggttcaggacagggaatgaggcagggaaggcaatgccggaggaggaaaccgaaagaacatgcaatcgtaaaaggaaacggtggaaatgctgattcacggtggttttgcgcctccggcgtcctgggagccggaagattctcgcctctcgcaggtaaaagcttttccggagcgcagaggcggcttttctttcaaatacccgtcgctccgctccggcggaggctgcgatgagggacggaggccctcatttccaggggcggccggacgtgaaaagaacgatggaagtgtttgctaaccgcatatttgcggtttccgcccaatacccagggcatccgtaaggggaaacttttccttcctgtaaaacctccccggcaggtagcaggtaagccgccgttggaaaagcactggagagtggccgcacagactttttaaagaggaggtcagcggaaatgcagggcggagcggtgagcctccgcgggaaccagagttttccagatgtcttcatccgcggcgatcatgcgctggatgtcccgcggcgtgtggcgcagcaggaattcattgaagaaggggacgtcaaccaccaggccgttcgccaggaagtgctggtacaggtgcacgtattgttccggggcgcggaaggtgcgcgccgtgacgaattccccggatttgcggttgagccagggagagacgtacaggcgcgtcttgttctggaaggtgcggccgaaggattccaggatgccgccggggatgtcctccgtccatttttccttgaacagttcgttcaacaggccgatggagagggcgatggcgatgggctcgttcgtgtagcgcgccagcagctcggacaggttgtcaaaacgggccatcttggtaatcagcacgttcttgcccagggctttcaggctgtccgcgcggtccaggaattccagatggtccacgtccccgccgcggagcaggttgttcatggatatttcacagatttccaggcagcggtccgcctgcgtttcattgatgtgcgagaggaagcattttttcacctgcgccatgacttccagatgcaggttgcagacgggattgaagctgcccctcatcagcacgatggggcgtttgtacagcacgtccgccgcctgggccacctggccgtttgccaggaacagggtggccggcgtcagaccggatttgacgagctggagcgcaaaaaggcggttgtccaccatggagaagccgtggccctcaaagcggacgacgtctatctccaccaggcggggatccagattgtccaccagggattcaatgaattcctccagccggtcccttttgaaaaagacggcgtgcaggatgttgacgcccaggatgcccaggtccttcatctggctgtcgtggtccgggtcattcaggcgcacgtgaatgatcaggtcggacggttccgcctccggcttcaattggaagcgcacgcctatccagccgttccacgggccgttgtcccggtagcctttcaccttcaccgtattgcagaaggcgaagaagcgggtgtccttgccgcgcttgggccccaggcggttgacgagctgggtgaattcgtaatccagcatgcctttcaggcgttcttccgagacgtagcgcttgacggggccgtacagcgtgtcgctgacggtcatgtcataggcggagatggtcttggccaccgtgccggcggccccggaggcacggaagaaccagttggccgtttcctggccggcgcctatttccgcaaaggtgccgtaaatggtggtggccagattgagttggagggctttgtcctgtgtttgcgctaatgctttggaactcatggaaaacgggaaccggttctggattgtcagttggtgggaaggaggttgcgggtggcgtcgctcatccatccggaatacagtagcttgtcaataatgacggactggttgccgggcaggtccgccgggtagtgaatgagcacgcaggcgcgcacggggccgttgtaaaggagcttggtcagttccagcgccagcggggaatacctgtccacgtacgcgttcaggcgctccccgttggggaattccagggagaagttgatgtaggcggtattgcggtagctttccgcggaggattcctccaggaagggcggctggtagatgccgggcatgctgagggctattctgacggggacgggtttggagggctttttggcttccagctccgccgggagcatgggggagtaaccctcccaggcttcccagtccagcttccatttgccggagttccggtcatacaggaagatggccgggcggacggtgttgtcatccatcagcacggatatctggagcaggtccccgttcttggagcttttccccgcttcctgcggcaggtagtccttgtaccgcccgtaggaggcccagtgagccattttggggcgcacggcctcgggctccatcacgtagttgagcctttcttcgtctgattccgccatgcagtagagggccagttcattcatggctgccgtgatgtgggcggagacggattccacttcccggtcttcctccctgcggggatgggtcatgagccggtattgctgctccctctgctccagttccgccagcaggtccttgttcacgtccagggagaagaccgcttcatggtccacaaaccggtctgaaatattcagaatcttggagccttccgcttccatgtcctttccgcgcaggaacatgaacacgcccagcgaggccagcaccaggccggagacaaagagccagatgtgccaggtggggcggcgctcgctgcgggcggcttcccgggcggtgggttggtattccggctcttcatgcgccagggaggcgctgcgggcggctgtgatggcaggggcggcgtcccccttttccttccgcttgcggattttggtagtgggttccgcagggatggggatggaaggcctggtaacggcaatgctccgtttatccgtctttttctgaggcgtaagagatttgtgggaagatgcggacggggaagcggaggggctttcctcctgcgcgccgccgtgccggacggaggctgctggttcaggcgtcccttccgggatttcaggcgctttttccggagcttcaggcatccgttccggggccattgctggctcttcctcctgccgggtggccgtgacggtggaatggcagacggggcatttcaccttgttccctatgcaggagggattgacggcaaaggaattgttgcacacgttgcagcggcaggggacggcggcctgttcttccgtttcatccttgactttctcttcctgccgggcggtgaccggagcggcgcagatggggcattgcacctggcttcccagaaaagacgttttcacggcaaaggggttgccgcatgacgggcatgtgcaggctaccgtatcctgggagggggtgggcatggaagaaaagggagttacaggtggatgaattccggaacggggatggtgatgggcttgggagcgggcagcgtgatgctcgtgtccgtatggtccggagaaacggggtctgcggaaagggcctgggcttccggcacgttttcacccgcgcccagcagttcatagttgcggttggcggggccctggttcagctccgtgtggtaggggtcgtccccctggaggatggccttggtgggcaggatgggcggcaggggcaggatgcggttctgcgccgtgaagggtgagacgggggcggagatgtcctccccgtggaggtcgcagaagggaaggctggaatcccccttgcggaggtattcaaacatggtgtggcggcggtatttcttgtccaccggatcaatgtcatagcaactgtgcgtggctctcttcccggtggtcaggcagatttccacccgttccacgctggggggcggggccagttccccggcggggaagaggcgttccgcctccgtgacggcggcgcccaggacggaggcgcaggtgtccgacgagaaggccccgttgtaaatgggttttttcccttccaggaagcctacccagatgccgcaggtgatgcggctgtcatagccgaacagccagttgtccgcaaagtcatacgtagtccccgttttcacgccccccctgaagtctttcggcagatgcggggccacgcgctgggcggagccgtttttcagggaggaattcaggatgttgtggagctggaaggccgtggcggtggaggtggcccccttccgcacctgggcgttgttccgggtttcaatggcctggttggattcccagatcaactggccgtcctcatcctctatcctgtccaggtaataaatatcctgcgggcgggagccgccgttcgggatggcggtgtaggccagcgtcatttccttcagggaggcgggttccgtgcccacgaaaatcttggggcggtaaacggggttcacctccgtgctgcccgcttcacgcacgggcttgcggatgccgaagtccgtgagctttttcacgaagggggatgtgcccatgtccatccccatgcgcagggaggcggcaatcttggaggcggacaggccgcggtgggcggtaatcatgccttcatagcggtttttggagctttccgcgccccattcccccaggatgccttccgagccgccgatgcccgtcaggcggttgtcaatggcgtcgtccagaatgcgggtgacggggcttttgcccgtgtcaaaggccgtagcgtacaggaagggcaggatggcggtgccggtggggcgggcgccgtccttgatggcgtcatactggcgcttggtgtaatccctgcctccgtggtaggccagaacggcgccggactggttgtccaccaccagcagggctccttccaggtagcgcggcttgtccccggaggctccgtggtagtccgcggctttctggtggcggtagccggggcgtttttcaatgttttccagggcctgttccagggatttcccggtggcctcctgaagcttcctgtcaagggtggtgtaaatcttgaggccggcggcattcacgcggtcctcccccagataggcggtaatctctgcggaaatgcggtcgtaaatgtgggagacgccgcgtttcagcggcctggggttgagccccaggtccatggcggagaggcgttccgcttcatccggcgtaatgtacttttcccgtgccatgcggttgagcacatggttgcgccatttcaggttgctttccggattattgagaggggaaaggccgttcgggtttttaatcagggcggcgatggaggcggcctcccgcgtagtgaggtccgcaggttccttgccgaagtagcccagagaggcggcgcggatgccgtagaacccgctgccgaagtaaacgcggttcaggtaaaactccagcacctggtccttgctgtaccgttccgtaatgcggcgcgccagcgctatttccacgaatttgcggccaaagctgccttcattcctggccttggcccggttcttcaggtcgtacgcgtttctggcaagctgctgggtgatggaagaggctccctggttggcgtccccgctgttgtggatgtattccctgcctgcccgcaaaatccccaggaagtcatagcccggatgctcccggaagcgggagtcctcctgggcgatcagcgcgttgaccatggcgggcgaaatcttgtccagcgtgacgtagctgcggttttccacataaatgcggcctatttcctccccgttccggtcgtaaataatgctgggcttttccaggtcgttgatgcgttccaggtcaaactccgccgcccagttgtcatagcgtttccaggccatcatgaagccaaagtagcccacggcccccccgatggcggccagaaccaggcaccacagcaccagcttccggatgaagctccagaatcgcttcctgggcttggccttgggttggcgccttttgttggcctgcatgtgcctgcgcggagcttgtgaacttaattcagccatgaagatgaagcaagatttgtcctgggaggagaaaaaacgtgcaaaaatcctagcggattcccgtttgtttagcaataccgtacactgttggcgagcgaaaaaagaaggcatgcgtcccgggaatctcccggaaccccgcaggctactgaatcatcctgcgtccgcaggacgcgccggctttaaggaaaaagcgcgtccgttccccgcgcgtttatattttaatgccgcaagggcttgcggcggtccgggcggctaatggtcctgcacggcgttgaaaatgttgcctgccttcgtgatgccgtgttccatggtgtacagcacggcgtccgccgcctttcccagcatcacgtccagaagctcgcgttcctccgggcggaatttgcccagcacgtggccgatcatctcccccttgccgcgtggcaggccgatgccgaagcggaggcgcgggaactcctgcgtgcccatgtgggcgatgagcgacttgatgccgttgtggccgcctgcggagcctttttcccgcagcttcatcacgcccagcggaaaatccacctcgtcatgaatgacgaacacgctgcgcgggtccagcttgaagaagcgcatcatgggccccacgcacaggccggattcattcatgaaggtggcgggcttcaccagcaggacgccggggcctgccgccagctcgcacttgcgctgcctgtccgtcttgaacacggcgccccacccggcagccaggcggtccaccaccatgaaacccgcgttgtggcgggtatcttcataagtcctgcccggattgcccaggcccacgatcattttaacgggtgcgtccacgatggaagagaaggagaaaaaaatgaaaactgccgcttacggcggcacggaaggcgcgcgggaaatcctgcacccgttccgcggcgcaatcaaccgttccgtgagacagccgggcgcttatctgcccgctttcttcttctgccgccccatcaggaacccggtcagcacgtcttccaaggcgtccccggtcctgaccaggcggtagtccgcgttaatgtccgtgcagatgcggcgcgtttcctccaggtagccggccacgatggcgcggtactcgtccgcgatgaggtccggttccgtaatcagggagccgccgccctccatgtccacaaagcggatggggcggtcaaagtcgaagtctatttccaactggtccaccagatggaacacggccacgtcatgcttgcggaagtggaggtgccgaagggcgtttttaagttcctccgtatccgtgaacaggtcggaaaaaatcagcaccagggcacggcggctgacgcgttccgccagttcatgcagagtctccgccagcacggtttcccccttggggtactgcgtatccatctggctgatgagcacgttcaggtgggcggggcggcgggaggccggaatgtgcagcgtggcgccgtccttcgtctgccgggaaaagctcagccccacggcgtccccctgccggatggcgatgtaagccaggttggccgccagcctgcacgcgcgcatgtacttggactccacctgctccgggtggtaattcatggagccggaaaggtccaggacgatgtaggcgcgcaggttggtatccgcctcaaactccttgatgtaatacctgtctgaccgggcgtacgccttccagtccaggcggcgcgtatcatccccggaaacgtacttgcggtactccgcgaactccacggaggagccgcggttggcgcttctgtggcggccggatacgttccccgtcatgctgtggcgcgcttccaggggaagattccccaggcggctgagcaggtcgtggttcaggtacttcatgggtgggcagggcaagggagtggataacgcggggacggtcagacttccgccgccaggcgcgccacggccttgcggggcgtgatgccctgggactccgcggcgaagttcgtgaccacgcggtgcatcagcacgggctccacaatggcgtctatgtcctccttgcggacgatgtagctgccctggagggcggcgcgggtcttagcccccagaatgaggaactggacggcgcgggggcccgcgccccaggccacgtactgcttcacccattccggagaagtctccagggaggggcgggtggcgcgcaccagcttcacggcgtactcgtaaatatgttccgggacgggcacgcggcgcaccaggtcctggtaaaaaatgatctcctccccggaaaggacgtgcttgagctcctcgctgcggtttccggtggtctcacgggcgatgcgcatttcttcctcctccgtggggtaatccacttcaatcaggaacatgaagcggtcaagctgggcttccggcaggggataggtgccttcctgctcaatggggttctgggtggcgagcacgaagaagggaggcagaagggtgaaggtgcggcccatgacggtgacgcggcgctcctgcatggcttccagcagggcggactgggtttttgcgggggcgcggttgatttcgtccgccagcacgatgttggcgaagaccgggcccttgatgaactcaaactgccgcttgccgccggcggaatcatcctggatgatgtccgtaccggtgatgtccgcgggcatcaggtccggcgtgaactggatgcggttgaaactgaggtccagcgtttttgccacggagctgatcagcagcgtcttcgccaggccgggaacgcccatcaggagcgcgtgcccgcgggagaacagggcgatgctcaacagctccacgacgcgctgctggccgatgatgatcttgctcaattccgcggaaagctccttgtaaatggcgccgagccggtcaatggcggctacgtcgtcgtcaggcagagatggggtggtgggttccatattgcatgtacataacacttttcatgcccttttccatcaaataatcgcgccgcattcattttccctgcttggaatgggaggggaaacggggtaaggaaggggcatgccgaaaatcgcactcattcaactgtccgcagacgcccggccctccgtgaacaaggaaaagacggaagccgccatccgggaggccgccgcccatggggcgcagatcatctgcacgcaggaactcttcaccacggaatacttttgcaggacagaggaatgcgaccttttcaacctggcggaacccattcccggagaactgacggaagcccactgcaagctggccgcggagctgggcgtggtgattgtggcctccggctttgaaaagcgcgccaccgggctgtaccacaacaccgcctgggtggtggacgcggacggaacgttcctgggcatgtaccgcaagatgcacataccgcaggacccgggctttgaggaaaaattctacttcacccccggcgacctgggctacaaggcgttcgacaccaaattcgggcgcattggcgtgctcatctgctgggaccagtggtacccggaagccgcgcgcctgacggccatgcagggggcggaaatcatcttttaccccacggccatcggctggttgccggaggaaaaacccctgctgggggaacagcagcactgcgcgtgggaaaccgtgcagcgcggccacgccgtggcgaacggctgctacgtctgcgccgtcaaccgcgtggggacggaaggggaaagcgaattctgggggcagtccttcgtggcggactactacggccaaattgtcgccaaggcccccgtcagcgatgaagccatcctgtacgcggagctggacctggacgcgctggaagaccaccgccgcatctggcctttcttccgcgaccgccgcatagactcctacggcggcatcacggaacggtggggaaagtgaatctgtagaagacccggctcatgtattcgcgggaacccatggaccgacaacgggagcagaccgtggaagtgcttcttgccatggaaggacagtgccgtgaattagtcatcgattgtcggcagggaatgctgggaaagcaggggtgccaggtaaccgtgttgagacgtgaacacatcctgtccctcttgcaggaactgaaccgtctgtatgattctggaatccccagaagggagctgaatgatgatgatgaggaagacgacgagaattgctgtttttcctggatttatgaatttgattttttccttcaggagtccggcttcctgctgcatttcgtcattgatgccgccctggattccgacggcgtcatcaagaaatatttgacgctggagagacaggtgcatctggaaggggcgtaccttaaagtgagcgaacccatggttcttgaccctgacgcattggtgcaattgaaaagaaaagtcgcggctatcatgaccgttcctcccaatacggggcgttttttggactggaaggatatctaccctggattggatgagtgacgttcccctctggaaaggcggcgtaaaaaaacgccgctcccggaggaacggcgttgaggtaagaaaaagagtttccacttagtcgcagatgacggcaatcttgatgcccttcatctggacgttcgtttccagggcttccgtgatttcatccagcttgaagcggtgggaaatcagcttggtcagcggcaggccgatgccgtaggcgcgcttcaggaagtcgaacgtggtcgggtaatcctgcggggaatacacccaggagcccacggcggtcacttccttgttgcagaggtcgtaatggtggttgatgacgctttccccgccgtccatgaaaaagcccacttcacacaggccgccgccgcgcttcacgaacttccaggcgtttgccccggccttgcccacgcccgtgcactggaagacgaaatccgccaggcggccgccgttatccttcttcaccgcgtcaaggaggccgtccaggtccgcgtaatgggtgaaattgtaggttcgggaggcgcccatttccctggccagttccaggcgggaatcattgccgtccacggcgatgatggtttcaatgcccagcgtgcgcagcgcggcgatctggagcaggccgatggggccgcagccctgcacaagcactacggaattgaacttgagcagtccggtggacttggcgcgttccagggaatggaccaccacggcggcgggttccaccagaatgcgctggtccagcgtcatgccggaaacgttgaagaacgtggaacccttgcggatgaccaggtactccccgaagtagccgttcaaatgcacgtcatcgtcaggcatcaggccgtacacgcccacgttctcgcacaggttggtgcgggccggggtattcaggcaggcgtcacaggtgccgcagggaatgatgcaggtgacgatcttgtcccccagggccaggggattgcccgccgtgtccttcgtgatattcttgcccatggccacgatttcccccgtgccttcatggcccagcaccacagggcagaggccgaaggggtcccggttgtactcgtggccgtccgtgccgcaaacgccgcaggcttccaccttgatcagcatttcatcatccccgatggcgggaatgggatattcacggatttcaaatttcttgggagctgtcaggacagcggcgcgtgcggtctgttgcatagtatattcatattactatcccttctccggccctttcaagtacaaatgtgagtggtcgtggattagcgtgttgcctcatgattcaggacgccgaggaaaagggaagcaagaagaaaaaagcattgcttgcctcaaaatacccaccacatttgggacacgctccctgaacgacacgacagagcaaaatgacgggaagagaaacaagagaagatcacgaacataaatatcgcgacaggaatgattcagggtagacttatgacattttgggcaggaaaaacgacatctcgcatcaattctaggctcgactcgaatagaggaattgtcaatcttggatttcttgacgatctattccttgcattttgcaacataggttgttgtttgtaacgagtgttacaagccagtgctgggaatgggtctccttgtttgttttgaagctacggtagcctttttcctgcagatttgatgcagagcccatggaatgaaaaaaatgccttgttctaatttgcgatacgaaaaagaagaatgatcaaaagtatgataacaatccttagtcattagtacaaagcttccaatctaaaaatagcgacgttaatggagtcaccttttcttcattcattccgccccaattactaaatgttttccttttctctttgacatcataaaagaagtacgaataaactaacttatatgcattaatgaagtccttttgatcagctatttggcaataataccaaaccatacttcttgtatatcgatctgatatattattcacaaaattgaaattataaattttatcttcatctgataattcagaagcatctatataaagaaaaattgataaatacgaataaacgagcgatctatagtcatatacaaatagtagcattctctctataatcagtttcgatattaaatcaaggttccatctgtcatcgtcctttttaaataatttgtatcggtcaatatttcctatgcaatattgctccttgagtgtttgcagctcattactgttttttgataacgtgtaatcgtccccaatgccgtcaaccatgctatctagtaaagtttttgcctcatcagtaatgtttagttccacataaaaacaaaggcattgcttcaaaagaagattgatatcattacacgttttctccaattttttcctaccctgttctttttctctgagaaaattacttaaccttggagcaaaacctgtttcgaatttctgtcctttaatttcatttcttgtttggatgagttcctgtcgttgatattcaagctccttcctctgcattttgagcgtgataatcatcaaggcaaaagccaacccggtaaacaaagccgacagtgctccaaacatatcaccaaaagaacttctgttttggtcgttaagtagccatatgcaaaggaacccataagcaacacagatcagagtcacacaaacacaccataacgtaacttccatcgtcctgccttcttttgctttttcgaatatatcagaattctttgtattcatgttcataacatgaacacctatgcaatacttggtcaaactaattcgaagaaacagcgattttttggcagatctgacgtagaactgaattagtcttccgtgatgaaaagggagcgggtttgatagaggccgtctttcagacggaagcggtactcgatcctccccagaggctttccgctccgtacggattccacaggaataatgatggaatctggcgtgagcgcggccagacgggcgcgaatggtccgcctcacggcatgaaggaatcattcagatcaacatggaaaatttttctccatgaatccgggttcttcaccatcctctggaaaaagaaaatctcttcatggtaaaggctgtctccgtaacggtggatgatgcaggctatctccggagcatctttgggaaaatccttcgctatgttgaaactgacgccgtaataaaatgaagattgccattgcctctcagaattttctctcctgcttcctgttctgtaaacgaggaagactggcgacatcaaatcgggacgaaacttgttcgccagcttttcctgtccggagggggccgtcataatttgtgcgggaggaagtaggaaaatgtaactttccggaaccgtttctgtttcctgagaggcagaaccgggtgttccgcacaaggtgaaagctgttaaacaaatgggtaaaagccgtgaaatcattcattcaatatatcaaggtttgcgggataaaaagttacaagcaggttacaagtgctgcacgtgtcttggcgggggatggaaacggggaaatttttccataagagcccgttcatttggcttgcgtggcggagggatggagtgcaagctgtgcgcgttatgctcgacatccgtgtaatacgagaaaatccggaaggagtgaaagcgcgtttgaagccccgcagcggcgacgcgtggaagcttgttgatgacgttctggcgtgcgatgaagcgcgccgcaatgccgaaacggaaaagcaggccttgcagtccgagcgcaatgccacctccaagcagatcggcatgctcaagaagaagggggaggacacctcctccattgaagcgcgcgtgcgcgaaatcggggaccgcatccgggagctggaccgcttggcggaagagaattccgcccagctcacctccctgctgatgaacattcccaacctgccgcatccggaatgccccgttggcgcggatgaaacggccaacccggaggtcaagctgtggggagagaaacccgccattgagaacccgaaggaccatgtggagctggccgcgaacctgggcatgatttcctttgaagacggcgcgcggatcacgggctccggctttgtggtataccgtggggcgggcgcgcgcctggaacgcgccctgatcaacttcctgctggacacgcagaccggggagaacggctatcaggaagtgggcgttccctttgtggtcaagcgggagtgcatggaaggcactgggcagctccccaaatttgaggaagacatgtacggcacggaagaccagcagatgttcctgattcccacggcggaagtgcccgtgaccaacctgtaccgggacaccattttacaggaaagcgagctgcccatcaagatggccgcgtacacgccctgcttccgccgggaagccgggagcgccggacgcatcaaccgcggcatgatccgcgtccaccaatttgacaaggtggagctggtccagattctgaagccggaagactccttccgggagctggaagtgctccgcagccatgcggaatccattcttcagaagctggggcttcactaccgcgtgattgaactttgcacgggcgacctcggcttttcctccgccaagacgtatgacattgaagtatgggctccgggccaggggcagtatctggaggtttcctcctgctcctgctttacggactaccaggcgcgccgcatgcgcctgcgctacaaggacgcggacggcaagaaccagttctgccacaccctgaacggttccggcacggctctgccgcgcctgtacgtagccctgctggaaacctgccagcagccggacggctccatccgcattccggaagcgctcgtgccgtacttcggcgcggacagcatccgcccggaacagggctgaaccggcattttcacgtcccaaccctgaatcaagcccatgcctgacgagggcccgctggaacactacctgactgtttcccatgagccggagccggacgttccggaaccggctccggaacgcagtcccggaccgtggcgggagaggggaatcatgctgggcctgggctttctgctggggtgcatcggggcgtatgcgctgatttattcggaaatgtccggcggcatgcggacgctgaaagagtcgctttcagaagaacgcgatgcgaatgcttccctgcaaaaggagcgtgcccatttgctggaaacgctggagcagatgcgcatggacagcctgctgacggaacgttcccccctttccatgacgggcaatggcattcccgggacgagccgtcgccccgttccccagcctccgccgcttacgccgctgccttcccgcgggcaggctcccccggctcccgcgccggaacccggctccgtggaggaccgcctggtcaatcccggtccggaggactggaaggaacgctaccagtacgccgctttgaaatacaaccgggtggtggaggattacaacaggctgaggaagctttacatgaacctggtgggccaggggggagccgccagcggactggtaacgggagcccagttttacaaggccctgcggaaggatacgcgggtggaggcgcgcaagctggatgaacggtacatgaagggagggctgcgcggcagcgagctccgggaactggaacgcagcagggatgaaatgcggcaccgggactggtggctgaaaaaaatggcgcgccagttccagatagattgaacgggggggaagacattcccgttgtgaggaataatccggtgaagcggctggcttgatgaaaggccgcacggggcaggcagcgctccgggattccatgcagccataaaaagaggcttcccggagaatggcctttcccgggaagccttgtataaataataaggccaggagcatgaaagcgccgggccttactggaagtgtggtgatcaggaagaagcgaatgttcttcccgcaattttaccgctgttagcggcggttgcggccatagccgttattgtcgcgtctgccgccgccgccattgccacggtaaccgcctccaccgccgccgcctgtgttggcctgcggtttggcttcattgacaaccagggggcgaccctgaaactcatttccgttcagggcggaaatggcatcgttcatggaatcggtggaatccatggtgacgaatgcgaaacctctgggccttccggattcacggtcggttggaatgaatacttcagtcacttcgccatgggaaccaaacaaatccctcaggtcctgttcggtggaattgaaggacaaattccctacgtacatttttgtgttcatatgatcaaaagacaagtgatctgattattcttaaatgcattcccgaagagccgggattagaagttaaaatccgaatacgcagacaccattgtctatagggcagaatatcctctggatattgaaatgccaagaataatatggctcatgcctgattatttcaacatccggcttccatggatgccgggaaccgcagccttttgagaagaaaaattccccccgtcagcacagttccgccgcaatggcgtccacgagcagtcggccgcggcctttcaggatgagcctttgttccggggaaatgtccgccaggcccagttcccggtattgttccagcagggggcgggattccggaaggatatatttcaatggcagcccttcatccgtccggagcatcagggcaatgcgttccaggcggtagtcttccgcggtgacgggttcctgttcggagagggggaggccgttttccagcgtgctgcgtatgtaggcgtccgtgtcccgcgtgttggagtaccgtatgccgttgatggtgctgactgcgccggggcctatgcccacgtagtcctcacccttccagtacgccatgttgtggggggagcggcagccctcccgggcgtagttggaggtttcatagtgttgcatgcctgccgcttccagcatgtgttccgccaattcaaagtaggctgcgtcttcgtccggatcctgccttttttcctcccgcagcaggctccggaagaattccgtgtcttcctcataggtgaggttgtaggcggagacatggtccgttccggcacggacggcttccctgagggtggcttcccaggtggagagggtttgccccggaatggcgaacatgaggtccatgttgatatggggcattcccgcgtttttcagcatttccacggagtgcagggcctgttccggggtgtgttcgcgtcccagcagatgcagaatgccggggtccagggattgcacgcccagggagacgcggttcatgcccaggctgcgccagaagcgcacttttttttccgtaaaggtggcggggttggcctcaaaggagaattcgtccagcctgtctacgggcacgagccggtccagggtttccatgaggcgtcccaggtgcgtgtccgagagcatggaaggcgttccccccccaaagtagagcgtggccgtttcccccccgcggtccgtggacagggcggcggcgcgggattccgcctcccgccccagcgcacggatgaagagcttcatgtccgtggaggccggcgtgtgcttgaagaaggcgcagtacgggcagatgcggtggcagaaggggatgtggacgtaaagatgcacggggtgcggcgggaatcagcgtctccggcggcgtccggaggttccttccccgtcgcccttcttgttctgggagagctccagaatcctgttggaagcctctttcatttccgatttgacgcgggatttttccgtgccgtccgccagggacatgtagttcttcgtcagggtgctgtagaaggggtggattttcgtttccttcttgttcttgggcttgtatttgaagccgtccgggcaggtgtccaccatgtttttcatccagggtagcagctcttccttgggaagggccaggcacagggcgtccagggagaaggacatttcctgctggtccacgtccttgggcgcgttcagggtgttgttttcatcccggtagaagttgagggctttcttgaagcccctgtccacggtcctcttgagcctgtccgtgccctgggccttggcgtacgctatctggtaggcggcctgcggttccgggtaggagttgcgcttggtctcggatttgagccaggacatgaggtccgcccactggaaggttttgtagtcatgttcctgcttcagggcgttttccagaatcacggaacagagcacgttgacgtattccttggcgtggttggccagcatttccttgccgtttttgtccccgcggcctacggaggagacgtatttgcgcgtcttccagagttttctgatgcccatgccgtccggaagggcttcccgcacttcatccaccatcttggtggcccccatgaggtcctggggagcctgcttgaagagcgtgtaccaggcttccgtgtagaacgggttggccttgagaacggttctcatggcggtctgcgtgaattccctgggcagcgtgccggaggggtcttgagcctcttccgtggaagagttcgcgcccgcgagcttgtagatattcatggcgaagcggctgtcgatgaatttctcgtagtcgatgttcatggacagggccaggccggactggtattccgcattcccggtgcgcggcgccttggagtcccggaagtaccagaatcccgtggtggctttcagggtgtctacgctctggcccacgctcagccagcagccgttgccgttgaagttggtggtcatcaggttgccgtggccgggctgtccggcaggggcggcggggatgccgcgggcaatctgggagttgcgggagatgagggacatggtgccgcaaacgccgccttcatgaagcttgcgttcattggattcccgggaccattccggatcagggtcaaagctgaacaggatgggcggctccttgtcgtcatccatgcggtaggggccgtacagccagaggcgcgtcgggccgcgctggcccatgtagcgttcccacacgctgtcgcattcccgcagggggcgcgtttccgagagggccatcatggccggccagggcgttccttccagggacacgccggtccattccacgcgcttgtggtccacgtcccgcagcttgctgcagttttcatatttgtccaccaggtaggtgaagaattccaccggggtggggaacgggtccctcttgcgcctcagctggccgtggcggtacaggtattcatgcaggaagccggccaggttgccttccgtaatggcggtgtcccctatttccgagaccgtggggtatttgttgatccatgcctgcttgggcgtgattttcttgcggtccaggtaggcttccaccttcttgtagcattcttcatccaccgtgcgcggagcgtttccgtaccagttcacggggggcttgccggcgcagtacaggtccgcgggcggaggcatgacgccggaggacctcaagccgttcagcttgcccagggcgtcaatgtagcggccctgctgggtgaggtcgaaggcgcccatgccgaattcgcggcgtcccaccgcaaaggccaggacgagctggttgtatttttccgttgtttccaggcccagttcatcaatcatgaaggccacattggtggcgacgctggggtccggcgggaagaacatggcgaagacttcacggttgttcttcgtgtttttcagccatttttcaaagtccggggagaaggtgccgccgcgctttttcacgtagtcgcgcacgtaggcttccgcgtaaagggggtatttagccagaagcttttcagaaaatttgcccttggaggccatggcttcctcccgcagcgccttttccatggcgatgacttgcggggagggggaaagatcgggcgcgaccggttccggctcaggctcgggctccggttccggagctaccacgatgggttccggttccggggcaactaccacgggttccggcttgggcggagcgggcttgggtttgggcttggggggaaccaccaccggaggcgccacggttttggcgacgggttcctttttgtccttgaggatctggtatcccaggaagccgaagaggacgagcatcccggtgatgatgaccgtgatgacggggaagccgccggagcgctttaccttgggcagcggcgcgccgggcgtgacggcgccgattaccggcttccggagctggggctgctgcggctttttggccgggcgcagggcctgggcgtgggcaacggccggctggggctgtgccggagcttgagcctgcgggtaaaggaagagcacggtgccgaagcccctcagcttgccttccgcattggcggagtactgggtttcaaaggcttcctgcgcctgggagaattgagcccggttttccggggccgcggacaattccccggtagccaggtcacgggtgacgaggccctgggggcagaattcacgtatcaggacggcctggccttccggggagatggcctggtacaggttataatccggaccgctttctacaagcgccgtgattctatagccgcctatgttgaaatgggacggaagggcaggggtttgaggaactgtcatgacgaatcaaaagatcaaagactcatttatttaaggaggtccggagccttttgtcaattccggagtgtggaagctgtgccatggcgtccgcatagcgcgggcacccgtctggaagaaggggaaaacctcgtttcaaggaagccggaagagggccttttttctccctgcgagcagggagccgccgggaagggctagcggatggtgaccttggttccgagaggtgtgtgttcaaagaacgtcttggccatgtctgccgggagacgcacgcaaccgtggctgaccgggtatccggtgacaaagcccacgtgcatgccgtagccgcccgtaatccgcatccagtagggcatgggggcggggtcgaagtaggttcctgcgggcgcgccgccggccctggcgttatagtccccgttgacgacggcaccggtggatttgctgcgcagaacgccgtacgtgccggatttgtagttggcgtccttctggataatcttgtaggttcccctgggcgtgccgaagccttccttgccggaggacatgggagagacgcccaccagcgtggcccctacgtagtagaagactttctgctgcttgaggtcaataatgatgtgcttttccccctgaatgcccgaaggcaggtcccagtatccctggcccaggcgggcttccggcggcaggtccgtgttcacgccggaggtggcgcccacgccggacaggtagctgtcctggctggacgcgccctggattttcccggcgattttatcaaacagggggggccttccatatggattgcaggaaacgagaatggaactgatagaagctaatgccagtatgccgggtttcatgggaacgggagaatgacaggcaggttatggagcctgtccgcccttttgtcaagatttgcatgctgttatccgttgcttattccgggggtatctgttatacacggcgcaaccacctcatccatccatatctccatgagtgaacaatacgaccttctgaaaagcattcttctggaaaaatccgtgcgcacgggaacctttacgctggcttccggcaaggtgtcagacctgtatgtggactgccgcatgaccgccctggaccccgtgggggccacgctggtgggcgcgctgggctggaagctggtgcaggaggagattctgccccgtttcccggaggtggcggccattggcggaatgaccatgggcgcagaccccatttccctggccgtcggcatgaccagcgctctggaaggggctgaaaagaagctccaggtgtttaccgtgcgcaaggagccgaaggaccatggccggggacgccgcattgagggcaatttccaggccggggataccgtggtggtggtggatgacgtcattacgacgggcggctccaccctgaaggcgattgacgccattgaggcggaagggggcaaggtagccgccgccctggtgctgctggaccgcgaggaaggcggccgccaggcgattgaggaacgcggcattcccgtttatcccctgtacaccaggacgtccctgctgggcaaataatttttttccgttcatgctccccgccctgatcggcataagcggccatgaagtgggcgcggaagaggaggcggccatcctgcgtttgcagccggccggcttcatcctgttttcccggaatgtggattccgtggagcaggtgcgcagcctgacggaaacgttgcggaagctctgccgccaccatcccgtcattgccgtggaccaggaggggggcagggtggtgcgcaccgcttccctgggcctgaatttgccttctcccgcttctctggcgcggagcggcggttttaacggcattgtggaactgggcgcggtgacggcgatggcgctccggtacctgggggtgaacctgaattttgccccggtactggatatttgccatgacccgtccgcggccaatgcgctgcccggccgctgctggggagacaatccccaggacgtgatttcgcgcggaggcgtttattcctccaacttgcgccgaggcggcgtgcaaagctgcggcaagcattttcccggcatggggcgcgcccaggcggacccccatttcagccttcccgtggttgacctggatgaacgtgagttgttcaagacggacctgctgccctttctggccctgtgtccggagcttccttccatcatgtccgcccatatcatgctgccgcagattgatcccgattatcccgccaccctgtccgaacgggtgatcagggggcttctgcgggacaggctcggcttccggggagtggtgtttacggatgatttgtgcatgggggcgattgcggcgcggcatgctccggatgaagccgccctgctttccctgaaggccgggtgcgatcttcccctgatttgccatgaccccctctcctggctggacggcgtggcttcccgcctggaaggcctggacgcctatgaccgggatgattccttcaagcgggtggagaagctgagcgattccctgtgcttcccgttcccggaaaaggcaggactgtgggattcctgcctgcgccgcgcggaggccttgtgccgcctggcggaaggggaggcggatgaagagtcgccttcctctccggttcagaagtattgacgcgaatgccgatgacggccttatgccgaaagtgcgccgggaatgaagccgggagctttatccccgtgacaggggaggaagggagtgtttaaagtctgctccttttgcggcgagtcaacaggatggccgttccaaccaggctcagcgcggctgtagccggttccggcacgaggtggttgtatttgcttgatgaatagactttaacgtaatcgatgtcgaacgcggctccggagttggccagcgtattctggtcaattcctttattgacccctgcattttctacccagttgcctccgatctgctggtcgatgatcaggtaaaattcgtttccgtctttgtcaaaaggccagtttgcattattgggctttttaaaggagccggtttcctttccgtccacataaaaggtgatgccttcttccgtccattccattccgtaggtgtgccagtttgttttttcagcgccgtcgctccagccgggggtgaccccctgggatttgtcttggtttggaacgccgttttcagaccagtggatcgtctggtagacacgtccttcgtaattcaaatgttccatgatgtcaatttcccctcctgccggccatccgatgctgtcggatttgggcatcatccagatagcaggccagacgccctgcacgcaatcgaatctggcgcgaacttctacgtagccgtattggaattggaaggttttcagagagtacactcctccgcaggcataggtctgggctggggcggtctgattggtctgggtggtgtagtctccgtattttccccacagggtcatggcggaattgccgtcctgttcccggaattccacaaggctttcgtcctgggattggtatttgcgccaatccggggcgttatggtttacgtaatcgatacggctccagttgcgggcattcagggaggggccgtcaaagtcgtcttcaaaaacaagttcccagtctttgccggagacccacggggttgccgccagggcaggcggcccggcaagggaagcgatggggaaaagaagaagaagcgttgttctgatggacataacagggaggggtgggacaggaggaagaggcgtcaatggccaagaaccgggcctgcagcccgaatatcgtgtaagggggcttttcctcgctggagaggtagagccccttttcttcacaggggcataaggaatggatgcccctgtgaagatttctttatggcaaggattggtttgtcattgcaagttggttgtggaaggctgcccaatgttaacgcgcaacgtttctggcggaatccgccttgtacacgtgcagttccgccaggcggactttgccccccttctggaagagcttgacgcgcagcctgttggtggtgataggctcaaacgtcctcatgcacttgataaagccgttgccggggagctggagcatgcgcagcacctccggctcattggcgtacatggctttctgcgcgtcgctgacgccggcggtagcggctcccagggaaccccagtggatgggaatccacttgccgcccttgttggcttcaatgacgaggcggttgtaccccttttcaatcttgatgtccacggcgcgcagggaggcggcgtttttcagggagagttccagcaccaggggatcgtcttccgtgggggaggcgtccagttcctcgatggtggtggcgtcccggtccagcagcttggcggtgtccacatggcctccggtggaggctttcagcttgtagtccgtgacttcctccgtggcgctgcccagcagcttcagttctcgcacgcggcattccaggccgtgccagtccgtggaaacgcggaacaggcagcgggagccttgcgtcaggcaggagtcgttcggggagacccaggttttctccttcttcttgtcggtttcatcgtacacctctatctggttgccctgggaggcggcggagatgtaggtgccgtccggcaggtggaaggagcagccccagttgccgtggtcgcggatcaggatgcccggcacccacaggtggttgcagttggtgaccgggtgggctttttccccgcagcccacttcaaagccgcctacggcgatggggcggtcatattccacgtccaggtcgttcacgcgccatttgattttggcgctcattttctgcacgcccggctgggtggggccgctgagctccttcttgtaggagtacacgttccactggccgccgaatttggagtcgggggtccaggaaatggtttccatgggggagaaggtggtggcgtcactgaattggacggtgccggcaaagtcgtacttgtaggcggaattggcctttccttccagttccttgtcacgctggagcccgagggcgcggccccccagcggctgctggacgtccacgttcagggagtattccccgggctggggcttgtcgtccttccgcttgggttcaaagaagatgcgcacgtccatgcccaggatcatttccgcacaggtggccttggtgagctggtccaggccgggaatggccatgatggccttggcgacgggaagggcccgggcattgacgacgctcatgagcttgaagcggcagccctgttccacggggatgtttttcagttcccggatggcggatttcagggagccgggagccttggcgcccagcgcggcgctgaccatggaccagttgcgcacataggtgttcaggaagcgggattccgtgtcaatgatggggggaaccttccggaaggatttggcctggaattccggcttgcccgtgatcgccaggttctggcgttccgcgcacagcgccgtgatccagacgctggtgcggatgtaggtgccgatgaccgggtctgccgtcatcagttccaggcggttggggttttgcatcatgcctccgtcaaacgggcgcaggagcgtcagcttccagcggaacgcctccatgttcttgtagtagacttccgggttcgtccgccagtaggcgggaagggcccacatgatggagagcgtctcggaggagtggccctggtcgcagccgccgatggggccttccccgtacatgatgcggctgtttttagtgtagagttccggtcccccgcagatgagggaggcgatgtagtacgggccgtggcggccggagtaggtgcccccgcattcgcggttgggttcaaaggtgaaggcctccgtcatgcggccgtacgggcccatgccggtggggcagatggactgggcgtggtccatcatcttgtccagcacgtcgtcttccgtgcgcgccggggtcttgctggccagcgccaggaacaggcacatgtgggagccgccgatgctgacgcccgtgcccgcatagccggggtggatgccgtggccggtgacgaagtccccgtaaagaacctcgtttttcatgcgctgcacgccgttgcggatggccggcagaacggagttgtcccggtagcgcagccagtattcgcacaggaagatgcccgcggaggcctgggggacggcccaccagcactgggagccggagaaggcgatgtactgagccgcctttttaatgacgggatcatatttcgggttgcccgtggccatcagggccagcccggcccagcccgtgtcgtagtggttgccgcagtagccgcccgggcgttcccaggagccgtcctcgcgctgctgggccgccagccattcgctcatcatgtggaccacggccttgctcttggcgcagtttttcgggaagccgagggcatagcttcccagctggggaatcttgaacgtgacgtttttcacgtatttcttcacggagtccggcagggtggcggaaccgcccacatggacagccacgcccacggaggccgcccctccgggcgttccggtgcctttcagcttccagtctcccttgggaatgtcaaagaccagggaggagacggcgtgagccagccacaccttgcgctcggggtcatatttggccgcgccgtagcccacgctgtattgcaggggcttgagcttggtcagcggaacggggccaccggggccttccagcctcaggtccgaccattcgaagccgtcgctgccgatgccgttgccgccgtcatccacatgaaggcgcacctgctggcctcccttcaccggaatggagagggagacgggctttttggcccgttcctcccggaagacttccttccagagcggctggatgccctggattttctccacattttccgcaggaatgaggttcagggtgatttttccggcgccttccgccttgtccaccagcaggcccgcgtgcatgtccaggccgcgcctgtcctggtgctggtaggggccgtaaagcacatccaggctttgggccgtcttgaagggctggccgtcaatgcccaggatcaggtcgccctccttcacgtatttttcagcaggggagccttcaatcacctgggtgaccatgtagaggttcgccacgggttccccattggggtccagcagggtttttgggaaaaagccccggaagttcgtgtccggccaggaggcgtccaggccgcgggcgcggaagcccagagggccgaaggtggtgatccagcccttggccacttcctcggagttgccgaaccagctcgtgtacaggttggcgtactgcttcctccactggttcagcgtcatggccttggcgaattttttcacgtaggcgttgacgtctcccatgttggtggtctgcctggcggcttttccgcgcggacggccgggggaggcgggtttgacggcagcttgtgccgccagggccggagcatccttctgtttggtgggagtttccggttccggctgttccgcagacgtggcgtcgtctgccggagcgtccgcctctccggcaggctgttcaggttcgggagcaggttcttccgcgggagtggcggagccgtcttcgtcctgttcctcaggggcactggcggacggcgtttcttccggctgttccgctgctccagccgggggggcctccgcggcggcgctttcctgttcaaaggggtcttccacttccgcagcaggcagggcggctttcttttccggtttgggtgcttccttcttctcttttttgggctgcgtactggacggttcctgcggggtggcggggtcctccgcaggcttctgcgtgtagtaataagcggcgcaggcgcctcccagcagaatcaggataaggatccagatgccggcggagcttttctttttccggggctgggaaaggggtaccgcatggacggggggcgctcctgctgcgggagtggccagggttctctggtcgcgctggaggggctccacgggagtagccggaagcggggactgctccgcggcgggatgaacgccgggcagggcataaaccaggtacagggtgcccagggcggggatttcccccagagagccgatgcggaactgggcttcaaaatcgtttttcagcggaaggacttcctgttcgatgtccgtagtttccggataacgcagttttccgctttccggatcgcgcacggcaaggccctgcggacagaattcacggaccaggtattgcacgtggttggcgtccgacgcgtaatagacatggcagagggcatccgtctgcttcagtgactggataaggtagccgttgatattaaatccggaaggcagtgggggagtggtttccatggtcaggaggcaattgataatccggctacttattaccacatccggagagctctttcaatgtaaaagggcgctttccggctgcggcgtgtgacgcgattaattgattatttacttgaatacatggctattatgtggtgcaagcaaggctcgattttccgttttttcattacgatcatgagttccgacattagattagatgccttgcagtaccattcccagccccgccccggcaaggtggaaacgctgccctgcaagccctgcttttcgcaacgggatttgacgcttgcctattccccgggcgtagccgaaccctgcctccgcatcaaggaggatccttcccagagcgccctgtacacaggacgctccaacctggtgggcgtggtgaccaacggcaccgccgttctgggcctgggcaacatcggtccggatgcggccaagccggtgatggaaggcaagggtgttctgttcaaggtgttcgcggacattgacgtttttgacattgaattgaacgtcaaggagccggaaaaactgatcgaggttatcaagaccatggagcccaccttcggagccatcaacctggaagacatcaaggccccggaatgcttcatggtggaggaacgcctccgcgaggaaatgaacatccccgtgttccatgacgaccagcacggaacggccgtcatctccggcgccgccctgctgaacgccgcagaactgacgggacgcaagctggaagacatgaaggtggtcgtcgtaggggctggggccgcgggcatttcctgcgccaagttttacatgacgctgggcgtccgccgcgaacatatctacatgtttgactccaaggggctgattcataccgggcgcatcgacctgcacgccacgaaggcccagttctcccagtcggaggactgctcactggatgaagccctcaccggggcggacgtgttcctggggctttccaccaaggggctgctcacgcaggacatggtgaagctcatggctccttcccccatcatcttcgcctgcgctaatccggatccggaaattacgtaccaggacgccaagaaggcgcgcccggactgcatcatgggttccggccgttccgactggcccaaccaggtgaacaacgtctcctgcttccccttcattttccgcgccgccctggacgtgcacgcttccgtcatcaatgaacagatgaagattgccgccgcccgggcgttggcggatctggcgaaggaacccgttccgcaggaggtggttgacctgtacgggggcgctcccctcagcttcggcatcgattacgtgattcccaagcccatcgatccccgcatcattgaatgggaatgcccggcagtggcccaggcggccatgatttccggcgtggcccagtcccccatccgggacatggaggcttacacgcttgaactgcgcaagcgcattgccgctgcccgggagcgcgtttccggcgtagtgcgcagttatttgtaaacggctccggcgtaaagccggaaaatccatgccgccgtggtacgcgcccggcggctgcatttggccgggggaggtccgttcccccggttttttatgccgggtagcggtgaggcggtgttgagcccttcatttggaaagaggccttcagggggggacgcctccggcctctgccgcttccggatgaataggcggttgaagggcgcactggcttttccaatgttcgttcgtccgcgctccgttttttcagttgccgcaaggggttgcggctctccatccggctgatgggagggagggggcgttgggcggaacggttcagtgcttagccagcgcgtttctgacctgttccgtctgttcccggtccggaatgagttccgcgagaacctggctgttttcctccagggcgtcaagctggtcgaagtcttccgccgtccggataaccaggtagcgcatgccccattgttccgcaatggccttgaaggagtaggcgtggggctgcacaagcaggttacgcatggcttccgaatggctggccgctccgggcagggcgcggaagatgccgcccccgccgttgttgatgacgccgagcacgcgggttcccttgtccagctgggggaggagggccagcgcgttggagtcgtacatggcggtcaggtctcctacgagggcccaggaacgggaacaccgggcggagacccccagaaagccggagatttgcccgtcaatgccgttggccccgcggttggcgcggacgttttccgtggggacggccatctgggcgaagctgttccagtaccgcacgggcatggagttgcccaggtaaatgcagtcgccgtccgcggcaaagcaggagaaggcgcgcaccatggcctgctcgctgtccgggcaggtgatgagcagttcctccatcagggccttcctgcgcttgttcatggcgcgcaggccgttgacgtcccccacggggtccacgtcgcccagagcgtgcagaatggcttccaggtctccggtgacgacggcggagggccgggccagcccggagaatccggtgcgggtgacggagaagacttccgtggaagggatgtcctccaggtcgcgccagaagcgggccacgggcacgtcccctattctgagcaggatggcgggcgggttttccctcagcagggcgtccgcatccgtcagggccagatgggccagttcctcccggaggccggaggtggcgtccgccaccacgggggctttcagttcattcgcgagccacagggcaggggcctgctccgtggggtccagtccgccgagcatgaccaccagcccgccgcgcgatttgaagcgcagggcttgggccagttccgccagggaaccgcggaattcgctgtcttccggcggttccgccgggtaaaggtcgcagttgccgggattccaggcggggtccgggtccggcaggcagacgttgatgtgcaggggggaggcgtaatcccagtcttccagaatgtcttccggcaggctgtccggcgtttccagatcaatcgtgggcgcgtaaatgccgaacaggtccgcctgttcgatggcctgcggagcggcggagccgcggtagtccgccgggcggtccgcggtgagcaggagcaggggccggcgctcatagtacgcctccactacggcggggagcagttccgccgccgccgtgccggacgtggtgaccacggccacgggaagccccatgtcctgaatgcggcccagcgcgaagaaggcggcggaccgttcgtcaaagtgggtccatttcaccaggtcctccgcggcggccagcacctggagcagcgccatgttgcgcgcgccggggcagaccacccattcacagatgccgcccaggcagcactgggccagcagggatttgacgaaggatgcggaggcactcacgggaatcagccttgttttttggccgtcctggccgctttttcagccagcttggccttttcctcttccgagagaatgcgggggaagacgggggccggatcattgatgcggtgccctgcgggaaggattccccaggccagcgtatccggcgtgcggccccggaacaggtccgcggcgttgagctggtccaggatgcgggcggaagcgtccggcaggacgcagccgatgaggtagcccgtctgggcgcagcattccagcaggtggcgcagcacgcagcggaggcgcggcgcggcggcctcatccttggcaagttgccagggctgctgctgttcaatatacgcgttgcaggcggaaacctgggcgttcagggccgccagggcgtcggagaccatgttgtcatccatgaatttggagaacagggtgacggcctggtccatggtgacgcgcagggccttggaggcttcgtcatcgtattcctccgcaccggagatgacggaatcgcagtagcggcgcgtcatgttgatggaacggttgcacaggttgccgaggtcattggccagctccgtgttgtacagcatgaccaggcggtccgcgtcaaagttggcgtcctttccggtggtgatgtctcgcaccaggtaatagcgcacgggttccgggccgaactgttccgccagcaggttggggtccaccacgttgccgatggacttggacattttttccccgttgatgttccaccagccgtggacgagcagggtgggcatttcctcgtcggagaagcccatggcatgcagcatggcgggccagtacacgccgtgggcgggcaccaggatgtccttgccgatcacttcgcagtccgcgggccagagcttggagaattccggcagttcgctgtccggttccgccaggtaaccggcgaaggagacgtagttgatgagagcgtcaaaccagacgtaagtcacgaattccgggtcaaacggaagttctattccccaggaaaggcggctcttggggcgggaaatgcagaggtccgagtcaaagtcaatggcattgagcacctccgccttgcggaaggccggaagaacgaagccgctgctcttttccacgaacttcttcatccactccacatggtcggtcaggcggaagtaccagttttcttcctccagttccaccacttccccccattccgggccgaagctgccttccgcgtccctctccttgtccgtcaggaattgttcctggcgcacggagtagaatcccttgtaggattttttgtaaagctgccccctgtccttcaggttcgtcaggattttctgcacgcaggccttgtggcgcgggtccgtggtggaggcccacccgtcattgctgatgcccaggcgttcccacagggccaggaatttggccgtgatgttgtccacatgctcctgcggcgtaatgcccagtttttccgccgtctgctgtactttctgcccgtgctggtccaccccggtcaggaaatagacttcctcccccttcatccggtgccagcgcgcgagaacgtccgcaaggactttttcataggcgtgcccgatgtggggcggtccgttggtgtagtcaatggccgtggtgatatagtacatgcggggaacgatactcctttccttccgttttgcaagcaaagtcatggcggcgtccagcgagtatttttaaaagcatgaaatagtagaataaggagttgcaatgaatgaagaaggcgcacggaagttcctttccatggagtcaggcggcctctttctttcttgacattctgcattccggacagcgtggaacgcgtcccatgaagattctgcgtcttggcgcttttcccggcgacgcattcatgagcgcttgaatggcattggccagatgctgcttgaggtctggatgaagcggatgacgattcttccgcactagttggccacacagggaatggctgcattttccccatggaacgtagccggaagcccaatgagcctgaatgtccgtggtgttttacagggtaagcgcctccttctcacatttttctggaaggtcagtcttgttgattatagaaaacatgtcgttgatcatgtgatgatagagggctgcattttggcgtatgatagggataatgatcgtatgcagcccttggcaggattccagagatgacggttcatagatgtagtgtttgcaaagatatgaattaagtctttccgtacattccctgtcgtggttccagttcggcgaatttccataaaatgcaaatccgcgaactttcaatgacaagcggctgatttccttgaaaatatccgcaggatcgccccatcgcaacagaacgctgctgtaaggcggcaggttgcacgtttctatgttttcccaggaccataacggcccttttctaaggtcggctgttttgcgattcgccacccaagggcatccccatactccaaatgacagctcagggaattttttagataagcgaaaggccaaatacacggctgccaggcaatctttacacaatcccgcaagaaggactgatttcaggcatggcatctgcctgatacgctcagacacgtcctgatacatttcctgaaaatgaagaagcatgtcccattgcaggtaacggatgtttatggtcggtctgtggtcatccgttaagagaaagtgttttcccggacggtcgaatgggttgataataagttcttctgcatttacgttttctggggtgatggaatccgtgcactcgtagaaggtaaaatgataaatatcggcggaacgccggataaaccgttcctttccccaatcatcccatttcagtaccagtttttctccatcatggtagagtacggtcgcgtggtcattgcggtgaagccggcatccgcggctatgggtgattcggaattcgtcgttccattggggatggctgatcgtgatggtcctccccggttgggaaaggactgggacgttattgtggataatgtttccggaaccgggagggcgtccctcattgcacatgttcttgcaggatggaattcggagaggcgttcccgttcccggcccttcttgcaacacggaacatgctgcggcaggtgtttgatggggtgatgcgttcatcataaaatgaataggtaatttcattatgaagaaataatcaataacaccccctttcttcattcagcaacagataattttggaagtaaaacccatgcaatacatgccacctgaaaaggatagcgcagcgttttgctcctcaaattatttttaagagagataataccggctttcaatagagttccgggcacggtgattcctgtttttcccttttatttcttagcgcacggaagaaccgttttttatcatcccggcgtttattcctccacagggtatccatggattccctccccctttctttttaacagggcggctccggggtgagggtccattcctcctgtgttggaaaatgatcttgctgctttccgggaagacttcaggaggaaatatttcaaggagggaggaacgctccggggcaggagaaccggcgatgtacggcaaagttcatcagtacctgtttccaggcaggaaacatgcaccgcaggaaaacaaaaaatgttttgatcctatgcctgatgctgatggaagccacggttcttataagccgcttccagctggttgagcgcccgttccaggatggagcgcgggcagcccgcgttcaggcgcatgaagccttccccttccttgccgaagatggatccgtcattcagggccaggcgcgctccgtccacaaagaattccgccagttccttctgaggcaggttcagttcccggcagtccaggaaaaccaggtaggaggcgtccggaagcatggccttgattttaggcatgcggcggcgcagttcccggtcaatgtagcggatgttttcctggatgtagtccaccgcctgcttgagccattcctccccttccgggccggagtaggcgctgatgagcccttcgtaggcaaagacatggccttccgccagttccctgccgctgacgaagctctggtattttccgaagagggccggattctggcagatcaggtaggagcttcccagtccgggcacgttgaaggccttgctgggcgccatgtacgtgacggagttcatgcgcgcctgttcggagacggtggcgaatacggtgtgcctgtggccgggaagggctaggtccgcatggatttcgtcagagacgaccagcgtgccgctttccgcgcagatttccgccacgcggcgcagttcctccgggctccacacgcggccgccggggttgtgggggttgcacaggatgaacatgcggcagccgcgcacggcctcccgcatgtggtcaacgtccatgcggtagcgcccattttccagaaggagggggttgttcacgatttcccgtccgttttcccggataatcatggcaaagggatggtacaccggaggctggatcatgattttatcccccggttccgtgaagcactggatggcgctggaaatgccgggaacaatgcccggggcaaagccgatttccgaggcgcgcacctcccagccgtggcggcggcccacccagttccggatggcgtcaaagaaggcgcggggcttgacggtatagcccagtatttcatgttcgcagcggcggcggatggcctccatgatgaaggggggcgttttgaagtccatgtccgccacccacagggggatcaggtcatcccggccccagcggggcagcagggcttcatatttcagggcgccggtgccgcggcggtcgattatttcgtcaaaatcgtactgcatggaatggtctgtctgcgcgggcaaaggtcaggaaagcggggtaacgccctttttcaggatgatgttgccgtatttggcggtttccccggtaatgacgacggcataggcctttttggcgcgttcatagaaggcgtagcgctccatttgttcaatgtccccgtcatagttcagcgccttgcggtatttggcttccaccgccgggtccagggagtctcccggcaccggggccatcatgatgacgggcgtggcgtaggcgtccagttcaaagagggggatgacggcgcccagcagggcgtccgcccccagtccgtccgccctcagcaccgtggggttgaaggtgtggccgggaaagtgggcgtcggaaaagacgatttcatcgccatgccccatttccgcaagaattttcagcagggaagggctgatgaggggagagatgttttttaacatggtccgcagtatagcaccttcccgcgttccggtactatcataaaagttgaaggagcgcggatgattctccctcagccgttaacggcatgaaagcatttacggatgcattcttccatttcaggcatctgctgttccatgctttccaccagcttgagctgggtgcgcgcccggtgcaggttgtggcgctccctttccgttttaaagtagacgtccccttccaggtagtccgtcaggaagcggatgccggtttccagcgtgatgagcaggccggaaaaggcgagtttggagatttcctgcggtgtgatgaagtctttgacggcatccaggtagcccttgacgacggcttcaaacatgggcatgcgcaggtaggttttgtccaggtcttcctcatcttccgccgcaggagaggtcatggtgcgcaccatgtccccgaagtcgtacaggatgctgccgggcatgacggtgtccaggtcaatgacgcagacggccttgtccgtttccctgtccagcatcacgttgttgatcttggtgtcgttgtggacgattctgacggggagttccccgcgctcctgaaggtccagcagcacgtccacgtaccgttcgcggcggcggatgaagtccagctccctccggcaggagtccaaacgcccgcgggagtccctggcagccgctttctgcaaccggtcaaagcgcttgcgggtgtggtggaagaacgggatggtttcatggatgtcctccgggttcatgtcgcacaggagctgctggaaggcgccgaaggcgcgggcggcctcatacgcctggcgcggatgttccgccacgtcaaacgtgtgtgtgctttcaatgcagttgtagcagcgccagaagccggaaccggggatttccaggtacttgcggcctccacgggcggagtacaggttcagcgtctggcggaagggcgttttcagcacccggagcatcttccagcggatgtggttggttaccttttccacgttgtgcatgacgtccctggggcatgggaaaacggcgtcattcacgcgctggaagatgtagcggtccgtggtgccgtccattttccggtaggtggcccggaaggtcatgttgatatggccgctgttgatggtgtcgcaatggaggaattctccggcgatggcgaaggcgtcgcccagggcggcaacctgttcctggagggaatcagtatggaaaacggcggacagtggcatgagcggggaaggaagaggctcccggcgcatgcggggaagtgccgggagccgcgggagtagggattgaaggaggcttagaaggagtaggtgagccccagccccgccacgaacgtgaagttgcggtaaattctggcggggattctggaggggaagcggtcggaaggaccgcggtagttgcccgccatgcctccgttgcccagccagacggtactgacgaagggggtgaggaccaggcggtccaccgccttgaagggcacggccacggtcacggaaatgccctgggttccgttggcgttgagggagtccctgtcaaagtagccggcggaggcgttccaggttcccgctacaatcagggaggaagacgggttgaagtcatatttgtagcccagcgtgttggtgaaccaccagccggacatccagcggaaggtgtattgcacgcggcagtcccagaagaagttttccagtcctttcccgaagtcgtggtggatgtccagtacaaagctgtgttcttcggaacggctgtgttcaaacgccgggaagtcgctggaggtctggcccagatggacgttcatcaggcccggcaggccgccgttgacgaactggtagcccagggaggccatcgtatagtcgctgaatttgcggctgacgcccagcagggccgttgcctcgtcggaaatgcccgtgctgttgtgcgtcaggtcattctgggtcagccactggtatttcacgccggccaggatggagtattttttgttgaggtcgtaagcgcctatggcttccacgggaaccacatggtcgctgccggactgctggaaagccagtccgcggctgacgtacttggtagcgtagcccgttcccagcagggcggaaaacggacgggacgcgtcataagtggaattcagcacccggaggggaacttgaatatcggcggaagccattcctgagagagcgaaggccgccgtgcatgccgcagcggtaatagttgtatattgcatggtttgccgacatagtaatggcgccgttcaattccgcaagacaatctttataaattcgaaagaattttcagttaaattacagggggaagttataatggaatgagtcggagaatccattccttcaattttaacagggttccttccaatttaagggacagttcgcggatgtgcagcagccggaacaggccgctccgcacgtagtcgatcagggagcaggcgaggtagatgcccaggctggctcccagcgccccggcggccgtgaagtaccaggggcaggcctgcaattccgcaaaccgcgccttgatgatgttttgccagatgaggggattgttatggatgaggtaaacggcaaaggaaagcggggcgaagaaggaaatgaggcggatggcggttccgctgctgatgcgcatgcgcgcgcaggccatgagcaggaagaaggaggacaggcagcagaacggcgccgtataagagacaaagagtttttccgcaatgcccggattgaggggaagataccccaacgcgattactccggcggtggggaggatgcagcacaggacgtagtaaagcgcgggccgctttaacgtgctccagagctggaagtgccccaggcagccgccgacgacgtacaggcagaccagccagatggcgctgtagccgccctggctgagccagttcccgtagccggatatggtggaaaagagggagaagacaatcaggaccagcaggcagagccacctggcggattccctgctgagggaacggatggccggattaaggaagggaataaagcagaacaggacggcataagccgtaaagtaccagtaggccaggcgcagcacgggaaagaatgcctggatcattcccttaaagcttacactgcccggcacgagccatttaaataaaaaggttattccagcggtgtaaaagaagacctgaaaccataagttgataaaacgggaaatccggtacggcacattgacgcccacgtagcctgtgataagggcaaagcagttgacggcgcagtaggcgctgagttcaagataccaggagacggcgtaattgggcgttccgaggaagctgttgtccaggttgccgccctccccccatttgagcacatgaagaaggacgacgaagaacatggacaggcaccggagaaggtcaatgccgtgatttctggaatgggccggggctgccatgagaaatgccaaggaaaaggtgatgctgctgggatcttacgccgggactgccgccattgcctgcaaacgcttcatgattttatttttcttcctcaacgttcttcgcggctccctccacggcccgcgccatgaattcctccagcgtgaggtttttccggacggcggctttcatggcaagattgatgatccggtttttcaggggaaccgtgatgagggaagatacctcattggaggcggccagggcttcctggccgtccatgaaccgcttgatgaggatttgggcatgccgggagagcttttttctgacaaagtagttgtcgatggcgcttctgttcatgccaatggctgaagccagcgtggagcggctgatatgattttcagccatccaacgccccagctccagaatatccacaagaggttcttccatgtggggtactttgctcattgtaatgatgaatcaaagattttgagcggagtatgattgataatcgctcaatgaatgtccttgttgaacacaataaagggtgggtgccatcaatgagtgttgtggattccccggagagccgggtaatttttggagggaggcatgcgccttcctttcttttctggatacttcatccattggtcagaaatgaataaaaaatcatcggcggcgttcttgccgcggcccgtaatccttgttgattccgttagggacattctccattctccggaatcttattgtttgaattaaagtttccttgccctttcttaaattctgccctgccgcatttgcaggggccggaacttggcgaatgcatccgggacaggcggccatggaagataacaaggcggtcccggagggacatggacggacagcgcatcaattcatggagatgcatgcagccgaacggatgagggcacattctttttctgcgtaaggaatgtgttttatcccaggcagaaactggcggaagcttcccccatgtggcttgggcggcatttctccggctgtgaccgggtatcctttcccggtggacggggcggatgtctttaatgggtctttgccctttaagccgacggctttcctgacggccgtttaacatgggccagatacggcagcaggaaaggggtgaaacgtttcaaggcaaaatagaacagcacaatagccgtgaatgccagcagcggggtgaacagggagaaggcaccaaatttcatggatgaaggaaggcattcgtaaatgggcaggtgcagcatgaacgtcagaaaacaggcgggagccagcagggctattctggcggcaacgccgggcagacgcttttccatccagatgcctgcgtacataatcagcatgactcccagcagcatgcccgcgaccgtttccgtccacagggaaaggattccggcggagtgcagcagaaccatcgcggaggaaacgagaatgctcacgcagaagacgacgccgaattttttgttcagcaccagatggatgtcgtcaatccggcgggaactgagcacgacgcccagcaggtagaaggcgcaggaccccacggagagcgtcaccaggggatcgggagccatgttgcagaaggagaaaaagaggagcagcgcgggcagcagcagtattttaatgcgggccagcagcggcgtcagcagggtaagaatgatgatgtcccgcagaaaccaggaggggccgatggggggaacgtcgggggactcgctcccgaaggagaagaggtccatgcccggcaggaagacgtcccggatgccggccaggtccgcaagctggaaggagctgccggcagggagggagagaaggaacaagtacagcacgttccagatcatgtacgggatgaacagccataaagcccggtcaactgccttgttccaggtgatgtttcttgccagaaagtagccggccagcaccaggaagaagggaaccctgccgttgtagaagaggtggatgcccgttgtcttgagcaagggggaggacaggtgcacgtacatgatcaggagcgctgcaagcacccgcgacacgtcaattcatgcgacacgttttttagggatttccatgggaagggagtttttctgcggcatgagccggatattgagttggcagagggttgaagttaatgaagggcggaaggtagggaaccgtccgggcgtcatgatctgcggatgcggtggtacgcccgtgccaggagttttcttccttttttcctgagccgctcccaccgggacggcggtctcctggtcagttttttctccgtcaggcggctgtattctgccagggtggcatccctttccccggagaacgcctgctgaagccattcccgggattgcgagattttctgttccagcagttcattgacgggagcgtagtccatcgtgagcgggacgttctccggcagggcttccgcgtcttcgggcagcatgcggtcctgaagccggagaaggttcagcagggagtggaagcgcccggagccgcgcatgggattgttgatgcacaagaacggcttgttgaagatcagggcgaagcagacgccgtggaaggagtccgtaatgaaaaactcgcagtggaggatgttgccgagccattcatataacgtggcttccttcatggtattgggcaggttcagcctgccgaggttgtccacctcctttttctggatgtccaccatgttcagcagggggagcccgagtttggaggaggcgtccagcaggagcttccttttttccgccgccgggtccaggatgtaggagacgatgcggcctttggccgccggaggcgcctgccgtgccagctcctcccagcgttccctgcccagcaggaagacggggtccatcacccaggcgctttcacgcccatagtgccgcttgaggtgctccaccatcggtttttcccggacggaaacggcatcgaaccgtttgagcagcatggccgtttttttaagatatttcccggaaggttccgtcaactgccccatggacggcccgtaggcgattttccgtttctcccctctggcgaagtccaggaagaagaagtgccccatgaaaccctggttccacacctggtcggagcctaccatgaacgtgtcaaactggtcgtttaagtggtaggcgtagtccagggagtgcagcggcgttgtggaaatgcgctcccggaccaggaatttcctgaataccgtcgcagggtctttctgccgctccgtgaaggaaaaatcaatcagggaaacgctttttcccatttgctccagcagccggtaaagggcgaaggaggtgagcacggctccatagttgcacgtcatccagacgcccagcaggcccacctccgcacggggcttgaagcgggccgtgtgctgcgccaccgcttccgtgaagggtttctgccggaggtcccggaggaagttccggcgcgccagccgggaggggaaggcagcctgccgccggatgcccctgttggtgtgtttgacggcatgccagtcctcccggtgcagaaagagctccctcccgcattggtttaaaagttcttccccgcggggagtgttcgccagcagcagggagattcccctggaatcatcccacttgggatggaagtatcccgcgccccagaagtcggccagggtcaggtcactggtgcgggggccggaagcatgcgggcagttgtagcatgcttcccccaggcagatgtctgacaggtacgcctgcatgaaaaggtcttccgtataaatgcgcgcgccggaaccggagccgtcccggtgggatttcatcacggagtagtggttccagccgtgggttttgtcccggaagttgatgcagcttatctgccggtccgtgctccgttcgtaatcctgccggtacgcgtcaaaaaggtttttggagggtacgccgtggcaggcgatgtcaatgatgaagaggctgtcccagggctttttcagataggctctcagggccgccgcctggcagggcgtcccggaaaacaggaccgttttcccctctttcaggtccttcttgatgtcccggtaggcgtggccggggtccgcctgaaggtatttgctgccgttcaggagcttgagctccggcagggagtccaggcgcacatggcggacggaaagttccccgtccgtgttccacgccacgccgtagaccacgcctccctgtgcaagaatatgccgggccaggatggtgaagacgcctccgctggaggagttcaggcgcacggcctcgtccagcgcccaggccgcgtatgccctgggctcgtcaaacgcctgggggggccgtgcgggcgcattcaggtccgggcaggttttggtgcagaggccgcagtggacgcacgcttccagattaaccgcgggcgttaagaagccggaggggctccagttcatggaaatagcgtccctggggcagatgttggcgcaggcggagcagcccgtgcacagggtggagagctcaggcggggcatcagtttttatcatggcgggaaggaatcagtttttgcagggggccgagaaacatgtcccgttcatcccggttgaggtagaagaaccagatggttcccacggccaggaggccgtagcagaaggcgaaggccaggaaggagaaccagttgtccagcgttagcagggcaaccgctcccagccccgccaggatcatgacggcggagggcagcagcaggggcccgtaggtgcggcggaagaagagcctcatgtccagaccggcggtgcgggcgtagtagcggttgatcatcagcacctggccgatgaacagggaaatggcggtgccgatgaacattccgatggtgccgtagtacagggagatgaagtagcccaggatgacgcagagcagggaggagtaaaagaggatgatggccctccccttgtggatgttgagggcctggaggatggcgagtcccgtgttttgagtcagcggaaccagcagggggagtagcacgatgacggcccccacccagaccgtgcctgtctggtccccgatggttttccccacccacaggtgcaggaagtcgtggccgcagctgatgaaggaaaccaggatgacgctcagcagggccagttgaaggcgccccacccgtatcatcatgcgggtgagctgctccttggtggaatccagggccaccatctgcatgattttgggggcaatgactccggaaatggcggtggaagccgtcatgaagtactgggagaacgagattcccagcgtgaacagggtgaccgcctgggcgcccgccgtccttgccaggatgggagtgcccgcccgccagtagaacaggtccatgagctggttcagcagaatccagaaggaaaaggtgaacatctcccggtacagcttccagtcaggcttgcggaaaatgatgcgcacgcccaggcagcggatggtgtaatacgttccccacgccaggctggctacgccgatgcccacgcccaggacggtgagggcgatcgccttgtacccccaaaccagaagcagaacagtaagaagcgtattgaagagggagaggcccaggctgaccagcccgggaacgatgaatttcatgtaggacccaggcacgcaggacagcggccgcaggggaaaggccaggatgatgttgcccagcgtcagcaggtacaggattttcagggtgtcaagctccggcccggacagattggggaacagggcgcccaggtttacatagcagatcatgcccgccgcgaaggtgagcagccccaggaaggagaacagcatcatggcctgtcccaggaaatgggcctcccggtcgttctcctttttcgcgtgataggtggcgatgtatttgttgacggtcacccccaggccgaagtccgtcagggacagccacgcaatcacggaattgctgagcatgaaaatgccgtattcattttctcccagactggacagggtaaacggggtcagaaagaactgcgtcgccagcctgacgatgatggatatgtaattaatgcaggcccccgtcttgatttcattcatgtggaatttatttcttgttggccagcaggttcccgagcaggtgcccgtaatttgatttgagggaaaagtaaagtatccgcggcaggttggcaagcgtcacatatttttttaaggcggaaaaagcttctttccgtatggccttttcccggtcggggtaaaggctttttattctatccgcaagaagtttatagttggcatagcaaagcctgaacaggaccaggaggctccggctccgctggaaatagttgctgctgtacggggaacgcccgtcaatgcagttgctcaggtccaggatggcgcgaagggcgttcatgtaatcctccagaggccttttccggttgaagaaattgctggtaacccctgtttccccgtcggcggaatattgataaaaaggcttgttgatgacggttacggagctgcaatggcagaaacattgcgccgtgaaataaagatcttccgcaaatttgacgttttccgggaatttaattttatttttaaccagaatttcctttttatatatcttggcccagcaggccggaatgttgttgttttccacaaacggtgttcccgcgtggaaaacagccgtggaatccggaggcagggggcggatggagggggacatgaagcccgtccattccgccgcgcaggaaacgaggcttgcgccgaagacgaccatgtccgctgcggtctcccgcatcgtttcatggcaggcctggagcgtttccgggaggagccggtcgtccgcgtccacaaacgccagatgcggggcatgcgccaggcttatccccaggttgcgcgccgcggacaccccttcattccgcttgtggatgacgcggaagcgcgcgtccttccgggcgtattcatccagaatcgcgccgctgccgtccgtagagccgtcgtcaatgcagaggcattcccagtccgccagggtctgtttcctgatggagtccaggcaggccgcaagctgcttttcattccggtacaccgggatgatgatgctgaacagggggatgtgcgcgtccggggtcatgaagggaaagtcaggggggcggcgggttcaacggaaagggcgaggggggagtacatcttctttttgaggaacaggaacctgctccagcccagggcatcgcataatctggtgactcccaggcaggccgccagcaccagcgccacggacagggcggcaaagcagattctgctggaatcaaaggccagcaccggtaccagcggcttgcacaggagcgtgaaggcgggggaaaagatgacgatggacagggaattcctgcccaggtaggcgaacagttcccggatggccctgcctgcggaatcgcaggtttttaccagaaagctgagcgtgagcatgcagaggcagagccccagcatgctgtcccgggcggggagggggaaaaggaggcagagcgcggcggcggggacagccgcccacagggtggggaagaagcatttcaggatggggagcccggtcatccggaagaaagcccccaggagaaagtaagcggcgtgaattatttggaacgccggattgaaccaggagacggcggccaggagggcggcgcatacgaccagccgggccggaggggacaggcgaggaatgcgggagacggcgtagtaaacgggctggcacacggccagcaggtagaggtaccagtacgttccggcgggggccagcagcagcgccttccagaaggcggggaacgccgggtccagccggttgctggcgggaacggaggcgggcagatgggacagggccaggtagtacagcgattcaaagaccaggtacggcgccagaatgcccagccacgttttcaggaactggcccggagtcttgccggtattggcgaagaagccggaaaggatgatgaagccggacatgtggaagacgtacacgtaccgcgtgacgtccaggtagtgcgtggagaaccaggacaggtggaaaaggaccatcagggtgatgagaattcccttgaggtagtccacttgcggaatccggcccctgccgggcgcggctgcgggcgggggaatggcgctgtcaatggctgcttgcatggctggaaaatgggcggcggaaaaaaacggttgagtggcgcatgaggcgttaaagatgccttgttttcagcaggagatgggccatgcggtacctgcgtgcggccagcaggcggcagaccaggtggaagtaggggccgcacaggcgcaggtcagctccgcgcgcggccagtccgctggagaggaagtcccggaacaccgccttgcgggcggcgtaggactgctgctggagggcgtggaagatcacgttgattttttgcaggatgtagcctttgaccacgggaacgtcttcctgcgggagggccagcgtgtccgtccacgccaggaatttggctgccagcatgtctatgtcctgcacgaggttgaagcggctgcgcttggccgcgccgttttcctcctcccgcgcccggtagtggtagaaggcccttttcaccaggctgatgcccggagcgcaggcggagaggtagtccaggacgaactggaagtcctcaaacaccaccgcggaggcgttgaagcggatgccgtttttttccagaagctccgtgcggaacagtttgttgcaggaggattccatgtccaggctggtcagcaggtagcgcaggaaggcgcccgtttcttccgcgggaatgtactggtcccggctgggcagcgcggtttccgtgcgggtaaggcggcagcccgtgtggaagtccttgctgattccgtagcagtggagcgcggcttccggcgtgcggagggcggcgtcatgaaggcaggccagcatgtccggctccacggagtcgtccccgtccacgaaggcggtccaggttccccgcgcccgggaaaggcccgcgttgcgggcggcgctcacgccgcggttttcctggtggatggcagtgaagcgcgcgtccttccgggcgtattcgtccagaatggcgccgctcccgtccggagagccgtcattgatgcagatgcattcccagtccgtcatggcctggttcctgacggaatccaggcaatcccggagaaaggggccggaacggtaaacgggaatgatgatggaaaagaagggattcatggaaaagcgggaagaaatgggggtcagcgcgccgtcttgccggagccttttttctgtttctcaaattgccgggcgtccacgagggtcctgtaccaccaaccctgcatgaaatgccacaaaaatccttcccgtccgtccagaaaacccagcttgaggaagtagcggtagcagaagtaggcgaaggagcgccagaagagaggctgccgggcgtagcgttccttcatggcgcgcttcctttccgcctgcccgttgatgccggagtccgccgcagcggaggaaagaatgtcttccaggtcagccagctcccgggcggagtagtccacgtgcttgtgcgcccaccagcccagtccgttcaggttctcgtccacgaagtcgtgctcgaattccacggcgcgcccgcggctgagctccatgtgctcgtccatatggcgctgttcgcatctggccgctccgtaacggaacaggcgcagcagcttgaccgggtaaacgccgtgcttcatccaccggcccaggaagatgtgcctgcgcttgtggatgactccggtgacgtccgggggaagggcgggcaatttttccttcagttcctccagggcttccggcatgaaccactcgtccgcgtccaggcgcagaacccaggcggtggtgatggggcagtggtccagcgcccagttgaactgcggggcgtagaggccgggccattcgtgctggaggacctgcacgtgggggtattcccggcagatggcggcggtgttgtccgtggaaaagcagtcaatgacgaaaacttctttggccgccgggaggatgttctccaggcagcggcggatgtgaagttcctcattcttggcaaggatgatgacggagaggtcgagcatggttcagcggagcgtgcgttgtttgatgaacttggccggattcccgcccaccaccgtccatggggccacgtccctgaagacggcgctgcgggctcccaccacggctcccgtgcctattgtcacccccatgcccacgaaggcctgcgccgccacccaggcccggtcttccacggtgatgggggcggtgacgagggcgtggccggggtctgaaatgtcatgggaggccgtgcagaggaaggttccctgggagatgacggcgtggctgccgatggagatgggggccttgttgtagatttccgtatctgggccgatgcaggcgtattcccccatggagaggttccacggcgcccatatcctgctgctggggtacacgagggagacgagcggtatttttgccccgaacaggcgcagcagcagattccggggcaccttcatggcgttggtggccatcatccggaagagggtccggttgatgacgtaccagccgtaccgtttgaggcggtggctgagggagtagtgttcctggtaacgggacaggttcatggcgggaggatgtcgtttgaatggtgaaaggcgttcagggccgggaggccggagcggcggaaggttccgcgtctgttctcattccggtggagaaggggcgcagggggccgtccgcggattcccctgctttctggaaataggcggcccggaaggcggctccctctccgctgccccatagcggggcgttccagggatgctccgggtggtggaggtggccctcccacagacgctgcatgttggcaagccgcgcggattccgtgaaggcgagcgtgggcgcggccttggcgaagacggagaggctgggcagggccgccagcgccagatagcagacgcaccatgcgcgccacgggcgggtgcccaccggctccgcaaagatgcgggtgaaaaggagggccaggcagaagaagctgacgcttgaggccttgtagcagaactcattgtagccgcccacggaacctatgtaaatgaagtaggtgagggtcagaacggccagcgcggtccagaagaggtcgtcttttttaaaccggcggaacaggaggaccgccggagcgccgaccgtcagcagccaggacccggccagcgcgccccagaatttccagccgccgtgccggagcaggtcaaagggggagtcctcccaggtcaggcggatgcggttgttcccgttgctgctcgtgaagtagattccggccagcaggacgagcgcgccgcccgccagcaccgtccaggaggagaagtactgcctggcgggaatgcggcggaccagcgcgcggacggcaatgaagaccagcaggcccagcgaaccgatgggggaggccagcaggcacagggaggccaggaagagctggtgccgtggcggtatgtcccaggcaaccgccatggcgaggaacagccacagcagcgtggtgtggtggaaggtgtaatggagctgcatggtgggggccacgccgccgaagaaggccagcaccgtcaggtagagttcatgggccgtctgcccctgcgggttgaataaatgaacgctccatctgaccacgccgtccagcgggccctggaagatgagcaggaccaggaagagcagggtggccatgcggaatttgccccagaggaccgtgagcgccagcgccaggcccagttcaatccaggcggtcaggacatagttgacgatgaagacgtccgaccaggagaagcatttgcatatcagggccggaggcagccagaaggcgaggtagtagatgaagtgcctgccgtccgcttccgccagcggccagtcgcaccggatgagtgtttcgtaaatggggttgcggaccacgaagtccgcgtgctggagggccacccccgttattcctcccgccagcagccacaggagggaaagaagaagggcgcagaggtaaacggccagctgccgcctggtgaagtgaagcgtggggaccgggagcttcacgcacagcaggacggaagccgccgccacggccatggccgccggaacggagaacaggggcctgacccagcccagcaggaagaggatggtgggcagaaccatataggccacggcgcaggaagccaggagcctgccgctgatggtgaacgctgtgtccgtgtttttccgtgtctgttccatgaggtggctgaatgaagttctgctagggggtgggcgtattattgcggaagacttcctcccactggcggacgacgtgttcccgagtgaatttccggcttttggcggcggctgcccgcgccatggcgtccagggcggcgggggactgcatcagcccggcggccatgtcagccatctgccgcgcctggaacccgccggacgccggcaggatgcagccgttctgcccgtggtccaccaggtcatacgcggaagagaagctcccgtagagaagaggcacggcgccgaaggacatgccctccaccacggcgagcggcagtccctcgtattccgaggccagaaggagcagggaggcctgttcgtaatacggggccggattccggaagccctcaaaggagacgcgttccaggcggcgctccgcgcagaatgcctgaagggcctccttttccgggccgtcccccaccaggcggagggtccagtccgggaagcggggttccagcagggcccacgtttccagcacgcgggagactctcttctggttgggttccagccgccccacaaaaagaagctccttcttcttgaaggccggatcatagcggaattcccggttttccacggtgacggggttgggaatcgtcaggagtttcccggtattcttcagtccggtgatgttccggaaggcccggtggaagctgtcggaaaggaggatgtaacggtcgctatgggcataaacgtagcgcaggctggccccggtagccatggcgcagcctttcagcaggaggcgcaggaaggccctgtttaccggattccccgcccgggccatgcgcattctgaggccttccagccgcgcgttgcagtccggggcgttgtggtgcacggccagcaggcggcaggagaggccccgcatggccttccggcacagccgggtgacgtggaagggcaggcaccactggttgatgacgatgtcaatgcggcgggaggagaggaggtcccggagggcggcgagattggcctggctggagacaggatagcccagccggtgcagggtgacgcggctgtccagcgcgggagagggcgtctccgtcacttgttcaaaggagaccacatgcacctcatggccccgtgcggagaattcattcgccagaatggcggtgacggtttccacgccgcctatggaggggaatttcccaagcagaaagaggaggttcatgaaaggtcgacgaattccggtttgggttcctgccccagcaggtaacggtacaggcgtttcatgctggcggccacctggggcgaggcgtaggtttccatgatgaggctgcgcccgcggtcccccatggcgcggctttcctccggcgtgaggttgaaggcttcttccagcgcggcggccagggcggcggggctgttgtcgcgccaccagccgcatcggcgggtatccagctcctcccacggcgttcctttactggcgatgacgggcgttcccgccagcagaccttccgcaatgctcatgccgaagttttcctgatggctgggagcgcagaggacgttgagcgaggcgagcagttcgtatttctccctccccgcggcgaagcccgtaaagcggatgccggggccgcccacttccgccgccagccgtttcaactgcgctgcgtagtcctccgggccgtccccgatgagaaggagctccgcgtcccggaggttgaggctgccccaggcccggatgaggctttccagatttttaatggggtggaaacggcccaggaacccggcgcggaaacgctctccctctctccgccggatctggtcaatccatgaaggcacggccaccggattggggatgaccgccatggggttggcaaagcccagttcgcgcaggtgccgcgcttcctcccggcaggtggcgtgaaggcagtccgcctgcgccaggtcccggcggtggcccagcgccagcatgagctttttcctccacggcttgatggccagcgcctgcgggtaaagcatgccgtggggggaggccacgcagggcttgcgcgttttccgggcttgcgcgcaggtagcgtggttgacgtccagccacaggccgttggtgtggtaaaggtcgtagtcccgccaggctccgagccggcggcgcagattcatggaaatgcccagaggggtgcggaggtcgttggggacggcgcggatgaaggagctttcctcctccgcgggactcccggccctgtcttccacggtgaggatgtccgtagcgcagccgaggtcgttcagggcctgcaccagttcgcgggtgcaggccgtggttcccccggactgggaggccatggaggcgatggtgtgcaggatcttcatgatgccgtttccttgaggggagcccagggagctgcggggcggttttcttcccggccttccgtataatgaacaatatggaccagatagcgggccgccgcggctccgctgatggtttgttccgcccacgcggcgatggccttccgttccgcggaggagaggcggcccttgtccagccattcccgcagggcgcggcgcaggctttccggacggtccgggtcaaaggagccgccacgcagatggccgtccagcaggctggcggctccgcacgcggtggagcataacaccctcattccggcctggagggcctcattcaccacggctccccacccgtcaaacaggctggggaggacgagcaggtcgcactgccgcatcaggcggcgcgtttcttcattccccagcgtgccgagcagggaaatctgcgcgcagccctgcgcctccagggcggcctgttcccgcagcgggccgtcccccaccacgaggcagcggcggaaggcgccgcggcattgccgggccgcgcggaggaagggcaggaggttcttgcgggggatgagctggcccacgaacaggaggtcgggcttttccccgggagcggggggagccatggcgggagtttccgcgccagccgcggatgcggctgattccgtgaaatagccccattcaaagacggagcccgccgggaatccggcgcggcggtagcattccacacccagccgccccgtcgccagcagggccgcgatttttttcccgtaccgcaggcggagaaagcggtacttgacgctcctgagcaagccgcgccagccctggcggcggtagggttccgcgtacaccatggttttcaggccgcggcggacggcctgcttgaacgccgcgtaaaccatcgggtaggtgctgatgccggaaaagacgtggacggccgcgggatgggcgcgcagggtttccttcaccgtccgggcgtccggggagatgaggatgcgggcgttccccatgtccggcaccgtccagccgctggattccctctccccttcaaagtccgtctggaccgccagcaggacgccgtgctcccgggccagcgccttgatgagggctgactggtggatgctgatcatgttttgccagaagacgaattgcatggtgttattttcctccattgggcaggttgcggtacgcatgggcccccccgatgacggcccagaagacggcggaaagtccggaaccggctgcaaagacgtacccttccgcaatcatgtggacggcgaagagggccagggccgcctgcgccggggaaacgggcggagagcccggcgcgcggaacgggcgtttgagcaggttgccgaacaggatgaagaggaagggaattccccccagcaggcccgtcatggcgaacacggccccgtaggacgtgcccggttcaatgatgccggtcaccagggattgcttgaatgaaatgattttctgtgaggcgaaccccacgccgtacaggggggaggaaaggaactccgtcgcgcggtcttcccacaactgggtgcgggaggacatggcgctccccatgctcaggttggcctgctgcttggcaagcgtgttggcgccgaagtgctggacaaagggcaccagcaggatgcccaggaagaacagggcgagcagcgcccggaaaagctttttgggggcatgcctgaagtacatgaagaagacgtaccccacccccatcagggtggctaccagggcggagcgggaggcggaaagcaggatggagcccaggcacgcgaccatcaggcccaggcggagcttggtctccttcctgccggaatcccggttttccagatggaggacggtcagataaaccagccccagcccggcgagcaggcccagcgtgatggattgccagaccagccccccgaagaggcccgccacattgatcatctcactggtattgtagcgcatgtagttgatgcccaggaagtagccgatgaaggagccggctccgatgaagacgcagaagcgcatgagccagaggaacaggttcaggcggaacgcgttcaacaggcgggaggaagtcagcggggtaagcgccagcaggaggagaaggaaataggccaggcggtaccagggcttgaaaatggcgggcggatggttgaacgccaggctgaggacgcatgccgccgccatgatgaccaggggcatgctggtcttcttcattttcgtcacgcacaccgcggcggccaccgccagcatcaccggatacaggggggcaagaaaggagatggcgcccgtcatggtggaggcgatcgccgccattaccaggaatgaccaggttccgtgtttcttgatgtattgcagaagggatgccatgctgttcaggggaaattcatgcggacggggaaggcgttcctatccggtagcccaggcgttccagctgcgggagcagggaggctatccgcgcttcccagggagcgtgctcgcaggccgcccggtagtttttatccaccaggtcctgataggaggaaatgttcgttaaaaggttcgtgatttgttcatgggcgttccgttcgcttatttcaacgacgggattgtaccccagcaggttgaccagttcctgcggggccctccctgccgggagcgtgcgggacagcatgcattcccagtagcgctgggtcagggtttccacctctccggccatggccgggtgcgtatcgcagcgggggtaggagacggtgatttttgcggaggccagcccctcgcagagggagcggaagtccgggaacaggaggggaccctccgcggcggggaacagatgaacccattcgggatgttcccggcaggcccggacggcggcgcggtggaagaagggcatctgcctgccgagctccagaatatcggcgggcctttcccggaggtcctttccgggcaggtagcccgccgggtcaatgccttccggaacgtggacggtccggatacggggcagttccttccggacgtgttcgcagacctgggaggaggtgcacaggaaggtgcggacgcggtggcgcttcagggaggagatgaggcgcggccagtaccgcggccagacgtcccacagcatggggatgatttcatgcgtgtaggcatgcggccatgcgaaggagtccggatagcccgcgccggggaccagcagggcgttccggcgggaggaaagcgggggcaggttggcggacagcttcagccgggccacggccagcagcgcgggccagggaagggggcgcctgcgcttgatgccgcccccgcaggcctgccacgcccgggcaaaccagtccatgaagaactggtggttcccctttttgcggacaggttccagcagaagaagctctttcatgggttcacctccttgagcatgccgttccattcgcggataatccgttccagcgtgaaaaattgttcctgcgcgcgcgccttccgcgcgtacggggccaggtcctccccggccatggcgtgcatggctccgcacagggcgcggctgtccccggcggggaataggcgccccgctccgctgtcccgtatgagttcccggcagatggggatgtctgcggcgatgacggggaggccgcagctcatggcttcaatctgcacgaggccgaagccctcgcaccgggaggggaagagcagaatggcgtgtttggggtattcccgctccatggctgtgtggctgccgtgcaggcgaacgcgggattgcaggccgtgttcccggatgaattcctccatccacgggcgcagggggccgtctccgtacacgtgcaggttccattccccgttattcctgctgaattccccgaatgcctccagggccaggtccgcccccttgtgggaggacagggagcccgcgaagacgaacgtttttgacgtcagcgcggaatgccgttccgccgtgaagctggccgggttgtagatgcgccgcgttgccaggtgctggcgcgtttcaaagttccgcctgtcgtggtccgacaggacgacgatttggtcgaagcggtggtagaaccgcttgagcgcatggcggaagtaacgggagaaatgggggcccttgaacccgaagtagtcttcataggccgcgtgggaccaggagatgattctggtgcggggggaaagccgcggccggagcagggcgagcagcagggagtcctcaaagccggacccgaagacgacggcgtcatattggtggcggttgatatggctggtgaggcgctttttaaaggaatgcgtgtaccgcaggaaagcgtacgcgcgggcgcctgcggaggaggagaacaggggagtccgggtgacgagcctgtccatcacggaacgcctcattttctcgtaaacgttcatttcatggtggaaaaagcggatgttctccaggtccagcccgtacgcgttttccagcggtgggcgccgcaggcagtacacgctgatttcatgctcccggcacagcgcattcatgatgcgcgtcaggacgcgggagactccccccacgccgaaatgttcccaggcgatgaaacagatattcatgagtaaacggaaagggttcggttcatctgggcttttccgccagcttggagagcaggttttcccacagtccggcgatgcgggatttgccgaatttcccgctgctccggaagcaggccgcggacatggcttccctcttccctccgtccctcatcaggtccaggagccgggcggcgtactgctccaggtcaaagggagggaccaggattccggtccggtccggttcaatgatgtcccgcacggcggtaaaggattcaaaggccatcgggatgcagccgtgctgcatgccttcaatcaggaccatgccgaagccctcaaaggtggacgtcatgcacaggattccggctttgcggtagtattcttccggatggtccgtggctccttcaaaggaatagttggtgcagccgcattcctccgccagcgcggccaggtattcccggtccggtccgtcccccacgatgcgcaggaaccagccgggttcccggcggcagaccatgctccatatcttcagcaggcggtccacccccttcactggattgtccagcctccccacgaacaggacttccctggcctttccggaagggatgctcccgttctcaaaggaattcatgttggggatggcggtgattttttccttccggactcccggcagaaagtcgtaaaagtcctgtttgaaggactctgacaggacgacgaaggcgtccgcctgcgaaatgcggagatagaaattcctgcgccacgtgacgttgtaatacatccttttcaggaaaggcgcgcggaggcggccgcggatgtccgagtggtgcatgtcgacaatggcgggagttttcccggaaaaggcttccagaaggcgcttcctgcctgccggaccggggaacagggctcccgcccccagcagttccccgtcatgaatgatgatatccggctgccgttcctccagggcctgcctgaaagccgcctgccgctcctcccttatccgggaggaaggagtgggcaggattttctgaatcccggaaaagggctcatagggggtgttccggtaccagctcacgatggcgcattcatgcccatgggcctgcaattcatgaatcagattgcacatggtgcgctccaccccgccgcaggatggattgagcgtgcccatgaaacaaaagagaatcttcattgaaaggtggacggttagtgctgaagcagggagttccattcccgcacgacgttcgccggggagaaaagggcggcatgctgcgggcctgcctgcgccatggcggagcggagggggtcgtcctgcatcaggcggaggagctggcgcgcgtattcctcctcgtcaaaggggggggccaggatgccggtttcaccggggatgacgaggtcgcgcacggaggcgtagctgttgaaggccatgggaacgcagccgtgctgcatggcttccggcagaaccagcccgaagccctcaaacgtggaggtcatgcagaagatggaggcccgccggtaatagggggccgggttccggaagccttcaaaggaaacgttggaaagtcgcaggcgttccgccagttctttcagggcggcggcgtccgggccgtctcccacaatgtccaggtgccagtccggcagggattttccggcgcgcgcccatatcctcagcagtctgtccacgcccttgacggagttgtccagcctgccgacgaagaggacgcgttgttccttttcctgcggcaggggcggcgcttcaatcggcgggacggggttgggaatggccgccagtttttccgcaggcgtgccgggagccagcagccggaattcctccatgccgccgcgggaaagagtgacgatgcggtcataattggccgccagttcccggaacaggcttttttgcagccgccgcgcccggagccgcttcacggggagcgccagtgcgttgaacaggaagtccctgcattttccggagaaggaggcggcgccccggcgcttgtggacaagatggtaataacgcagggcggagtattgggagctgtgctgcacggcgaccagcttcacgggagcctcctccatctgggtgcgcgtgcggaagatgccccagcggcccgtgacgcccccctccgtctggtcaataagcacgtccgtcttttcctcccgcagcagtttcagcaggtagtccctctctccgctgcgggaaaggccggaaggaaggaaggcgaggggtacgggcgcaaagtacgtttcccccagcctgtttttctcacggcagagcagcagaaccctgtgtccggcgtcccgcagcatttcagccaggccatgggtggcgcgctccatgccgccctgcttgcccagaggctcgtaagggagatagatgacgatgttgctcatggttattcttgcaggcattccatccagaggggaatcactttttccggttgataattggttaataccctggtgctgggcggcacgtaggggccgctcatcagctcatccagctcccgggcgaagaggcgcaggctgaagggcggaatgagccgccccgtctcccggtccggcagcatatcttcagcagcgtggaagctgttgaaggcgatgggggtgcagccgtaggaaagggcctcgttaatcaccatgggcatgccttcgtgcgtggaggtgaggcagagtatccgggccttccggtagtagggcgcggggtcctgcactccttcaaaatggacgttttccaggttcagccgtgccgccagccgttccaggttgccgcgttccgggccgtccccgaccaggtacaggcgccagtccggatgcaggggctgcacccttttccagaccttcagcaggcggtccgccttcttgggggaatccaccagcctccccacgtaaagaacggctttttccttcccggaaatgccgggctgcacgggatcataggtcagcaggttgggaatggcgtacaggcgcgccctttccggtgcgcccgccagttgaagggcgtcttccgtgtagcgaggggaaaggaacaccaccttgtccgagccgcggaacatgtccctgtatttcctcctcttgttgctgacggccacatgctttttgtacggcaggagcgcccggcgcaacagcgttttcacggtgttgccccaggtgctgaaatccttccggagcagggcggaaaagtaatccagcccggtatggacgtcaaaggagatccaggagacgatggacgcctggacggaaaggcgctcatggctgaaaaagaaggagtcgtcctggttggctccgcagttgatgatgcagtccgtctgctgcccggcgcacagggtttccacgtactccctgttttccgcgcaggagagcgtgcctgtgcggggaaggaggaaataaggcggttccgcaggcagtgaatccgcgccccggagggacaggaaggaaacccggtggccgtgccgtgacagggcctgcgccagaagatacgccgcccgttccgttccgcccgcatggggcaggatgggatggtcaaaatagaagagcaggttcatggcggcggaacgggaaggcaaatgggacagtgaaaggggatattaccgggtttggaaaaagtagcggacgggattgcccgtggtacccgccttggacagcagccgggtgacgccgtagtgccacgggcacggaaggctgtttttcctgaaggcctgcctgttctggcgcgtattgcgcaggatggcccgcaatcccgccgtgctggaaccgccggtgcgcatgaaaaccatgttgcggtcgatataggctgtggagacgcggttcttttcaataaagcggagcatcagctcaaaatccgccgcgctgccgatggaggggtcaaagccgccatagcgggtgaagcagtcctttttgcagtagaacgtggggtgcgccgggcaccatccgcgctggaaggagccgggcttgtagtccgttccgcgccatgtccggacgactttccgggccgcattgatgtaatgcaggttgccgtgaacggcgtccgtcccgtgctgcgcgaaggctccggcaatggtttccagaacgccgttgtcctggtaatagtcgtccgcgttcagaaagccgacgacgtctccggaactcatgcggacacccttgttcatggcgtcgtaaatgccgttgtccggttcggaaatccatttcagccgcccgtggaagcgcccttcaacgtcctgaagcatttccagggtgccgtccgtgctgccgccgtccacgaccaggtattcatagccggtccaggactgcgccagcacgctttccagggtgtcctggagagtggcggcgctgttgcggcaaacggtgatgacggtgattttcatggcggcggatgcagggaaaaagcgggcgtcccgcccttcccggcggagaaggggttacaggcggagtttggtgagcatgttggcattgtgggcgtctgttccccaccacaggtacaggttttccttctggaatttccgggcggccgcctggcaggatttcccgtaaagcccgaacagggagcctatgttcccctggaagctgattccctgtgaggccagggcagccagttcctccggaggcatgatcttcccgtagcgttccggatgggccaggacgggaacgaagcctttctcctggaccagttggagcctgtccctccaggcgctgggaaggcggaactggggaagctccacgagcaggtggctgccgtcgtggctgagcggctcttcctcctcaagcgcctgttcaaaatggtggtccagcatgtattccgccgccaggcgcaggtcgaaatcccggtccggcagtgcatccagaagctgctggaagcgggccttcaggcgggcgggcgtgttggagggatagcggctgctgatgtggggggtgcaataggctcccctgaatcctttttctttcaatcgggaaatgatttccagactgtcccggaggatgtgcgctccgtcgtccacgccccacagcaaatggcagtgcatatccattccgtccggacagagcgcagcggttttaaacctgggttgaaagagggaggaaaacaaggccgggaatcaggaggggttgttcttggaggtgttgccgtagtggtagccgtagccgtaatagctgtagctgctggatttgaaatccacggcgttgatgacgaagcccatgttcggaagctggccggattccgcaagctgctggacggtggcgatgtgccgcttgtctatcctgttgctgcggatgacgtacagggaaatatccgcgtggctggcgaggatggccgtgtctgccaggatgccgtatggcggggagtcaatgatgacggcgtcatagcgttccttgaagaggcggatgagctcctccatttccggcagggaaaggagggtgaccgggttgggaacctggggcccggcgtacaggatgtccactccgggatgttccggcagggtgcggatgacggagaacgggtcttccaccttgcggagaaggatggtgctcagccccttgcggcccttgccgtcaagctgcttggacagggaggccttgcgcaggtccccgtcaatgaccaggacgcgcttgccgatgttggcaaaggacatggcgaggttggcggagatgaacgttttcccttccccctgcatggtggaggtgaggaggatgacgtgcccctggttccgggtgacggggagcatggagtccgcattgtggcacaggatctggaaatactcagaaatgacggagtgttcatccgtgaacatgcgggccacctgccgctgctccttcttggtcatggccggaagctccgcgaccacgggaaggtgcgtgacggcgttcaggtccttcctgttctttatcttgttgttgagcagggccagccccaggaagccgaggatgcagacgatggcgccccccgccgccgcggtcagcacggattttctggtgttgggggagatggggtaatccgtgccgtgggcggattccagcacgcgcgcggaggattccgtcagggccagcgtcaggtcgttttccagctccttgcttaaaagcgtcaggtaaagttcctccttcacccggtgttcacggtccaggggggtcagctcccgggcctttccggaggtggccgtcagccgcttggcgatgtcctgcctcttcctggtgagttcctggagtttcagctccagattgttgcggagattgtccagggacctggacgccgcgctgcgggtggcgtccatcctcttcgtgagggtgacgacaatggggttctgccccccggcacttccggcgaccttctggtattccaggtaggcggcgttgtaggcttcaatctgccgggaaaccccggaatccgcaatgccggtatccagggaaatgagacccgccttgtggcccagggcgtccaggttttccttcaggccgtccgccagcttcatctgcgtctggagctcaaagatggaattgtccagggtttgggccgcgttgaagtctgcggagatggacgcttccgtgtctgcgatgatgtcgtttttgattttgatatcatccattttctggtccacttccttcaggtccgcgccgatctggccgcgctgccgccggatgaaatccttcgtcttcaccgccttcgtgcggcgttcctccgtggagtggtcattgtaaaccgcgatcagcttgttcagcgtgtccgcggccttgtccggattggtggaggtcagcgtcatttgcaggatgctggattccttggcgtccggacgcgtgaccgtaaaattggcaaggagctggtccgcagcggcgttcacgggaatgcggcgcacggtgatggtggtcccggaaacggtttccggcatgttggaggtggggtaaaccgtgacggtggcgaaggggagggaaatgggggcgtggagcttccctttctcctggatggggttgccggcggcgtcatggtacgtcagcgtcacggcgttttccggctccagcgtaacgtcaaaggtgcagaagcggttctccgcgatgtcgtcaaacgtcacggtgatggggctgtccttgtacaggtctatttggcgcaggtcctgctgcttccagtaggagacgttcagcgtcaggtcctccaccgtgttccgcatcactgtgcttgagcggaggatgaagctttcattggccaggttggcggctccggaatccatgcccagttccaccttgatgcggtccgaggaggaggaatccttgttggattcccgcatgatgacgctggccgttttttcaaaaatgtaattctgcttgccggtcacgtaataggctccggcgcctccgagaagggcgaagagcaaaatccagtaccagcgtctcagaaggatgctggtgatgacatccagtgacagggaagattccggttcctcggcgggaggggctgcggggggagcaggagtatctggcataaaaaggaatcaatcaaagaaggctccgcctttccggaggacggaaaggcgggaaatggggggatgtgcgcttacagggcgcacagggcaacgatgccgataatcaggccgaggccggaagccgtccagccgatgtattggacggtatcgctgcgggtgttgatcttgcgttcggcaggcgtcacgtaaatggtgtcgttctgctgaatgtaataatagggggactggaagagatccttgctgcggaggtccacggtggcgatctggcggcgtccgttggtttcacggatcagggtgatgtcccggttgccgtcgatgttcaggtctccggcgcggctgagggcttccagaatcgtcaggcgctggccgtccacgttgtaggtgcccggggaggccacttcacccaggacggagaacttgaagttggtgatctggacgttgacggaggcgtcgctgatatagtccctgttccgcagggtggcggcaatttcatcccccagccgggagcaggtcttgccggccgccttgatctttccgatgaccggcaggacgatgtagccgttggcgtccaccaggtaacccttccgtgagctggtgccctggctgctggaccctatttcggagacggcaaagggggcggccagttcaggctgcttgctgctgacggtgatggataactggtcgtccttctggatgacggtctggtaattccccttgatcttttcattggtctgtccggagacgtcctggatatacaggacttccttggggctgacgcaggagggcaggagggaggaagcggccagcgctgcggagcagagggcggctttgctgattaggttgttgatgttcattggttggagagaggttggatggaggtattcagaatgatcttctgggaagggggggaggagggcagggaaaggtcgttatgaacgagggtctgccccagcttgctctggaacgcctcgttgcactgctggattccttcacggatgacgaccgtgcgggccgtctggaaaaggagggagagatccattctcagattgacgttctggacgtagatcaggtcatagcaaaggcggcggcagaaggggatgccattgcggccgtggatctgggccatgccggtgatgccggggcgcacggagcagcgcttccggcagtagttgggcgggaatcccgccatctgggtggggatccagggacgggggcccacaaaagccatgtcacccttcaggatgttgatgagctggggaagttcgtccagggaggagctgcggaggaagcgccccagcgggaacagcctctgctcatcgggcaggagctgcccgttttcatccttccggtcgttcatcgttttgaatttgatgatcttgaacagtcttcccctgtaccctacgcgcgtttgaagaaaaaacggggatttccctgtagaaagtacaagaagtaccgaaacggtcagcagcagcggaatgaggatgatgagagctattccggcaaggaggcttccaagaaacggtttgcagatatgtatgtacataagcggcgcggcagaattaccggattgcaaatccgatgtcaatagtaatcattaaagaaaaaatacttatttatcattcccgcgccttaaaaaactaaaaaaatttaactcaaactattgttttctgtatataaatatatgtaattaagtgtgttatgatggaatttatcgtaccctattattttgataggatttgcaatccgctggatattttattacaggtgcccaagtattgaataacatgtctttttataatagaaatatggttgaattagtgtaatcaataagataggaaggttgaattggttattgctgtatttgtgttggtttgaaggggaatgaagccgtttgcgcaggtaagggaaggactatgcatgacgctgttcggtggagtccggaaaggaggctcttccgggtttttccttcctgaaatctgtcatttccaccgtaatcgggagaaacctgcggccttccggaccccctccttttgtttagccttgagttgggggcgcggagttgttaggatagaaggcaggtatggcattggatgtgcaggagcatcatgcatttgagcgtgaagaggggcgtccccctgtttggataggaatggcgtggggcgtcgtgtccctgctgggcggggctgcgctgcttgcggccatgctgacgtttgacgtgcgggaaataggctggagttatttaaatgattccgggcaggtgattccgggcgcctccaatgtgctgggcgtggcgggattgtacggcgcggggattctttattgggcgctgggcggcatggcctggatgctggtcattctgttggaatggtgggggctttaccgtctgctgcaccgtggaagtctgccccgcagcgtggtgtacggcggccttttcctgctgttgttcggctgcctgttcctgacggccgggcatgtgccgggtgacgcatgggtggcgcgccaccagattcagggcgccggcggcctggcgggacatctgctgggaacggggctgcttcttccgttgaccggcacgtccgccgtgctggttctttccgggctgggctatctgctggccctggtttatgccgcgggaatgcatccccgcccgctgttccgcgccatgctgcgggagtggcgcgcctggcgcatgaacaggaaggagaaaagaatggcgcgccagtccgcgcagcttgccagggaggcggcgcgcgtaagggccagcatggaagatgcggccctgtccgcccccaggccggccggaaagggcagggcatcctctccccgcctgcagcgcaccggggacgacctggaaggcttatataatgaagtggccgcggcttcccctggcaggtccgcagaccccgctcccgccccccgcgcaccgcgtacgcaggggcatcttccgctgacgccgcgccccaggattaccgtggcgaagccggcggaaatcaagcccgctcccagggagcagcctttctccaaactgtccacgccgcctacggaggaattccgggattacgagcttcctccgtttgagctgctgcattacgaagaaaagccggaaggccctacggaagaggacaaggatgaaatgctggaaatccagcagaagatcattgataccctgacgacgttccgcgtggacgtgacgccgggggacattacccgcggcccgaccatcacccgctatgaagtttaccccgcgcgcggcgtgcgcgtgaacacctttgaccagtatgcgaaggacatcgcgctggcgacgaaggcggagagcgtgaacatcgtggcgcccattccgggcaaggacacggtgggcattgaaatcgtcaaccgcaacaaggtggccgtgccattgcgggaactcttgcaggaccccggcttctgctcccccaagaagaaaataccgctggccctggggaaggacgtgtatggccgcaccgtgatcggggacctggcatccatgccgcacctgctggtggccggggccaccgggtccggcaaatccgtgtgcatcaacagcattatctcctccatgcttctgaaattccggccggatgagctcaggctcatcctggtggacccgaaggtggtggaaatgcagccttattccaagctgccgcacctgattgtgccggtggtgacggaccccaagaaagtgcccaatgccctgcgctggtgcgtgaatgaaatggagcaccgctaccactgctttgccaaggtgggcgtgcgcaactttgaagccttcaacaagcggccgccggacgcgcctgcggaagaggcggaggaaccggaagacggggaggtggatgaagccctggcggaatccattgcccgtgacctggaatcccagggggaatggcccgcggaagaggatgatgaactggacctggaggacgacggcgtcatccctgaacgcttcccctatatcgtcatcatcattgacgaacttgcggacctgatgcagacggtgggcgcggacattgaaacgaacatcggccgcctgacccagaaagcccgcgccgcgggcatccacctcattgtggcgacgcagacgcccagaaggcaggtggtgacggggacgatcaaggccaatattcccacgcgcatcgccttccaggtggccagcggcacggacagccgcgtgattctggacaggcagggtgcggaaaaactggtgggcaagggcgatctgctgtacctgccgccgggttccgcgcaggtggagcgggcgcagggcgcctttatctccgacgacgaagtggaagccctggtggcccactgcgcctcccaggccaggcagaaattccatgaagaggttcagaaatccctggacgaaccctcccgcggaggggcggacagcccgctggacgacgcggaggaggaatgctacgccaaatgcctggaagtggctgtcattgagcgcaaggtgagcacctccctgctgcagcggcgtttgagcatcgggtacggacgcgcggcgcgcatgatggatttgctggaatcccgcggcatcattgccccggcggacaataccaaccgtccgcgcaaggtgctggtggaatgaaacgacgagaaaagcccctccccatgaaacgaatcctttccctgcctgctctggcggcgttcgtgctgctgggcgcctcctgctcccagcaggtgcggcccgtcaaaaagaccgcccggcctcccgtgtacgtggggaaggtggagcaggtgtaccccagccacaactatgtgctcattgcgctggccgggaacatttacgagccgggaaccgtgctcatttcccagtccccgggcagggaggaaaatcgcagggtcgcgaacctgatcgtgacggaggaacgtatgggccgggcgcgcattccggcggacatacgcagcggagccgtggaggcaggggacctggtgttcctgtaccggaacctggccgctccggaaagctccggaaaaaaggataacccggacccggacaatccggaaccgaagacggatgaagacggcaaggaggttaccccgccgatttccccggacggcggcaaaacgccggacgggctgcttccggtgcccggggaggcccccgcgccggatcccgcggaccaggagcgcatttcccgtgagcgggagaaaatcctccgggagctggaaagcgttccgggcaagctggatgacccgtggcgcgaggctttttccggaaaatcggcaggaaaatgattttttagattcattcaataaaagcttgtttttcagcaagcccggattaggataatcccgcttacgcaaccagatgactaatttatgaaatccatcaaaggaacagaaacagaaaagaaccttctcaaggcttttgccggagaatccgaagcgcgcaaccgctacacctactttgccggcgtggccaagaaagccggttatgagcagattgccgccatcttcctggaaaccgccgacaatgaaaaggaacatgccaaggtgttcttcaagctgttgaaggacgcctgcgttgaagtaacgcacaccgtttgcacggctcccctggaatccacggaggaatgcctgctggccgccgctgccggcgagcgcgacgaatggtccgaaatgtaccccacgtttgccgaggtggctgaccgtgaaggcttccccgccattgcggaaaccttccgccagattgccactgtggaacagcaccatgaggcgcgctacctcaagctggctgaaaacgtgcgcgaaggcaaggtatttgccaaggaaaaggaaatccagtggaagtgccgcaactgcggttacgtgcacaccggctccaccgcccccaaggtgtgcccggcctgcgtgcatccccaggcgttctttgaagaactggcggacaacttctaatcgtcctttctccagaaacatgattggggccggtttcacgagctgatcgtgtgatcggccctctttttacttacggacgccttacgctgatggactggaaacgcacggatgcggtgtggatgagatatgggcgcagcctctggaaattcgccggaagctacgggctgggcatcgccctgatgctgatcctgctggtgctgacgtttgccggaacgctgcatcaggtgcggctgtcttcctccatggggccggaggcggccatagaatccttcttcggcgcgccgtatgtgctgatgccgctgggcggggaaaactccctggtttccctgccgctgcccggcatgggcattacctgcgccctgctgtttgccaacctgctcataggcgggatgttccgcgtccggtggacctggaggcacgcgggcgtgctggtggcccacggcggcattctgctgctgctggccggcatcatgctgggcaataaaatgacggtggccgtggaccaggtggaactgccccagggcgaccgggtgcacgagcagtccctgccgtttgacctccgcctgaaccgtttcgtgccggaattttatcccggcacctccaagcccaaatcctatgaatcccaggtaaccgtctttccggaatccggcggccagtatgatgccgtcatccgcatgaacgagcctctccgcctttccggctggacgctgtaccagatgagctgggggcaggactccctgcatccgggcaggctcatctccgtcctccgcgcttcccacaatcccctggagcaaatgcccaaatggtcttcctacatcattgccgcgggactgctgtggcactttgcctgcgtcttcggaaggtacctgcgccgcaaacccggccaggctcccgccggagcggaggcggcggacgaccatctggagccgcccgctcccggcggcaagcgccgcctgcgactgataggcatttgcgtgctggtggcggcaatcttcggcgtcggcatgctggcggcccggcctgcctctcatccggtccgggtggagcattacgtgccctggtcctccttcctggtggaacgggccggggcaatggccgtccaggacggcggccgcctgaagcccgtctccacgtacgcgggcttccatctgctccggaccctgggcaaaagaagctttgccatggagacgccggaggggaaaaggaaactctctccggtggaatggatgctggactgcatgttccgcccggaatctgcggaacaataccccgttttcctggttaaccgggaggaagtggtcaggcgtctgcacctgccggaccaggcggacaagcggaaaaaatactcctacgcgcagattgcggaacactgggaggaaatgacccgcgccgtccgggaaatccggctgctgggagaaacggatttgacggaagcccagaaggaaatcctggccctttcccgcaactttgacgtggtgcgcggctggatgctcggctcccgtatcatgctggaagacccctccgccatggaacggatggaattcccccgctggttcccctctgcgggccagaatggggagcgtctctggacggctgccccggacaaagccaccggagcctttctggcaatggcctccctgctggaacgcaaggccatcggcatggaaggcgcggaagcctccggactgcggatgaaggcggaaggactgctgctggaaaaactggcgcagcccaatgaagccgcctccgccggggaacggcacagcctggaaagggaaatcttctactaccgcctggacccgctctatgcctccctggccgtctttgtggcggcgttcgtgtgcctgctgctctgcgccctcttccgtcctgccgccaacgctcccctctggcgccgttttctgcggcccggcgggttcagccctgcgtggctgctgggtgcggcggggaccggcgtgctggcggcggccctggtcatccgcgtgctcatcaccatgaggtccccggtgggcaacacgtatgaaaccatcgccttcatcgcgtgcatgggcgtgctctgcgcgctggtggcggagctgttcagcaaaaagggcatcgtgctggcggcggggcttctgctgggggccttctcctgccagatgggcattctgtacgaatcctcccaggccgtggaccacatggaccccctggtagccatcctgcgctccaacttcctgctctccacccatgtcatcaccattgtgctggggtacgcggccgggttgctggcggcggtgctctcccatgtatacctgctggcctcccccctgcgcctgatcggcaggaaaacggaacaatccctggaccgcatggcttacggcatcctgtgcttctccctggtattcacgctggtgggaacggtcttcggcggcatctggggcaatgaatcctgggggcgcttctggggctgggatcccaaggaaaacggggccctgatgattgtgctgtggcaattgaccgtgctgcacgcgcggaaagccgggtggctgtccccctggctgctccacttcagcaacgtggtgggcggcgtcatcatcgcctttgcctggtggggcgtcaacatgctgggcgtgggcctgcactcttacggcttcacctccggccgtgacgccctggacattttctactggtctgaagccgtcctgtgcgtcctcttcgtcattctgcattaccgcgcgctccggcgcgtggacatcaggtagggggagaaggacgcatttttctcattttctccttgccggtccgggttctccggtatatattcccgccacctcatgcacggatagctcagtggtagagcggctgtcttacacacagttggtcgggggttcgaatccctctccgtgtaccattaataaaccccgcaagcttaatggcttgcggggttttcttttataggtggtttaccaggcggatacactctggccttggtcgggtgcgatatttatttttgagtttggtgttcgagattggaaaggcgtaaattaatttcggtaagggtgcgggtttgttcattgatgaacgtccgcatgtcggcatacatgattgcagcggcagcaaagcctacaatcatgacaatctcggccttgtactctctcaggagcgtcaggtaagcgcgggttctggtgcacatgattacttgcttgcatgttgctgcataacggacggcatgtccgttcccggctgtgcccgggaatagggaatatgccttgattcccggagcagggcggcggcatggcagcttgccgtgtattccgcccccgcatccccggaatgtctaacgtatccactggcgcccgatgctgccatggttgccgccatcaggtatttgacccgcctccgcctcccccagcggccagactccgcctgtttatcttttttagtatcttgtttgttgatgttcaatctattgtttagtaaaatacttgaaaaaatctacagcggcggagttcatgagcacaaaatccggataatggacggaggtgaatctccggtgtcctccgctctcattgacggcgtcaaccgtcaggactacaccctccgtcatctcaataggactttcctgctctccttccggaacgttggaaatgaactgctccactctagcccacacctgttggacctgccagggcgcgcccatggagacaagggcttacaccacagcttccagggccggagcatgagaaggaggaatgtcgttctccgtgtaaatgcgggactctataaaacctccggaagaggggaaaacggcagtcatgttcaatttgtcccattctcccaacaatgggaattgtatttgtatttgtgctttcatctttatttaacctccatcatttcacaccattccgccactacggatttttgtccgtaaagtcctacgtaagtttttaacggcttaactccgacttccagcgctcctctattgcataatagccttatattttgtagatcgacacaattgtgataggagtcggtaatccaggtgttttcacaaacgcggtatgcctccaggcgcccgccattggaatcattggctccaacaacccagaggcctccgttgccgtctttcccccatcctatcgcaatcccgcgcagccggaaattgttcggcagcgatgcatagccagtcaatagctctacttgattcgtattgtaattatagcggcaaacgcgcccgcgcacgggaatcttgttgccatcctccgggtcatagtctgcaaaataaacatcccaccacatggaaacgccatctgcaggttcggaaaaaggataatcatctggtccattccaggcctcattcagcgtaacgtccagcaatccccctgccactacctgaaacatgcgctgataccccagactggcagacaggggcaaaaaagctccggttgagtgggaataagacccttcacggtcgctttcatggccaaaaggcacacaccggaaattaaaatctacccagccgttttccgttgccggtttaggccaataggtagccagccaggaaaacggcgttaacaatttaccaaacggaggagtggaaaaattgaaatagttccgagcggctccattggaaatctcgttaagtaccctgacctcatgttttcgcgccgcgtccgtttccgtgacaggatcaacgggaatattgatgccaccgttggcgttgtaggtccctgccgtcgtcagacttccggcaagcgtcatattgccgctctcatccaagtggggagcggtattccatcggttgcgctcctcttccgtgatatggactgacgcgtccgctttgtgggcatcgaatgtttccgtgcttactttggaattaacttcagatgcttcagccttggagttccaggccgttcgttcatcctctgtgatgtgaacggaattatttttttcatgctcataaaaatcattatgggccgtcagtaaaattccgttgatagaggtaattttatccatgatttttgtttattattggttgtagtgaggtagttgaacaactttggcgcctccttatccatgatgaattccggctcatccggcatggaaggcttgcaccttccatgcgggttggcttcttcaacggtcagggcaactctggacggggttcatgagaacctccccttccttcggttgcggatgggctgaaatttgatccagcggcgccctggcttgaagtgccttacattccccggataaaatggaaacggttgaaacccacttcggaaaaaatctacggctgtcccggagaaaggtcatcccgcatggaacgttaagactgcatgaatgctgcttttgcctggagcatcatttggacgtctgccgttatggataaaaaagctgccgcacctttcggtgcggcagcccctgtttaatgatgtattgaatcggtttctgaatgggaatgaatcaggcgccgaaatccagcgccttgggttcgcgggcccagacgcggtgttgtttcatggccgtgatgaaaggtttcatcagggccttggtgtctttcggcgtgagcagcccggcgtcgtccatatcccggggcaggtccgttgcttccagcatttcactggcgtcgccgggcaggccgatggcttttaggtgccggtatgcctggcgcaggtggtacttggcgtctccgttcatcaggagcgttttaatgctctgctctccttccggcacgatgacggcgtcaaacacgacagaggggttgccggacagggtgccgtccacaagcaggtctttcccttcctccgtattcacgcttcccatgtgcggggcaagaatctgggggtgcacgccttccttgtgcagggcgctgcagatttcctccacggatttcaggctgacgccgtccgccgccagcagggagacgcgcatgcccttgaggttgccgtccgggttggcgtacaggctcagcgccgggtctttttccaggccgcagaccggtttgggcagttcccggttaagctgttcctccgtgagttcaatgcccaggtttttagctactccggctgccaggtttgggtcaatgcgcgtcagcaggtccactacccgttcccggatgtacgggcgcgtcaccttgcctacttcaaagctgaaggcgtcaatgatgtgcctttgctccacgggagtctggctcatccagaacaggcggggctgggcatagtattccgcgaaggaggggctcctgagacgttccttgacgccgctcaccggctggggggcggtggagaaaccgccttcttccgggggcgtttcacgcggccagttgtccccgatggagttgggatcgtaattggccggagcggtgtctatctgcatgcggtggaagccgtccctctggttattgtggaaggggcagacggggcggttgatggggatttccgtaaagttggctccgcccaggcggtgccgctgggtgtcgctgtaggaaaagatgcggccctgaagcagcgggtcgtcggaaaaatcgatgcccggcacgatgttggcggggcagaaggcgacctgttccgtttccgcaaagaagttgtccgggttgcggtccagcaccatcttgccgacgatttccacgggaaccagcgcttccggaatgagcttggtggcgtccagaatatcgaagtcgaatttgtctgcgtcctcttccggaatgagctgcaaaccgagttcgaattccggataatccccggcttcaatagattgccagagatccttgcggtggaagtccggatcgcgtcctgtcaacgcctgggactcatcccagatcagggattttttaccatacgccggtttccagtggaagcggacgaaggtgcttttcccttcttcattgaccagcttatacgtatgaatgccgaagccttcaatggtccggtaactccggggaatgccgcggtcggacatgagccacatgacgttgtgcagggtttcaggctggagggagacataatcccagaaggaatcgtgggccgtctgcccctgaggcatttcattgtggggctccggcttgacggcatggacgaaatccgggaatttgatggcgtcctgaatgaaaaagacgggcgtgtcgttgcccaccaggtcatagttgccttccttggtatagaacttggtggcgaagccgcggatgtccctcaccgtatccggagatcctcggaagccctgcacgttggaaaaacgcacaaagaccggggtcttttctcccggatcctgcagaaagcccgccttggtgtacttggaaagggacttgtatacctgaaaatagccatgtgccccggaacctcttgcgtgaaccacgcgttccggtatccgctcctggtcaaaatgagccattttttccagaaagtggaagtcttcaagcagagaggggcctctgcttccggctttaagtgtattttggtcattggctattttaactcccaggttgcttgtgagcggctggtccatgccgttggagcgcatggtgtccagatccttgattttttccgtggtattgtccggcattttcatggagccgggagcggagggttccgcattgggcggcgtaggcttcggagtgggcttgatcagctccggatcaatcgtatccgtgtaatggggttccgcttcctttccgtcggtgaaaggagcgaggctgtcttccatgggcggcgtcttttttttcatttgcttgttcatgatgggaccgaatttcttctatacgggtaagggttcgacttctctttttccggtgatgttctgtcatgttttgtcagcagcctccgttcagggatgatggagattcgttgaaaagaactcgacttgaaacgtttatatgatagagaatggcatctatggaaaaggcttgtttgattggcatggcttttctgcctgtggtccatgcttcattcgcagcagggcagcaggcggaagaccgcggggatgtagccgtggacacgcggacggcattcgggaagcctccgcgttccctgcatctggaaccggtggagagcctctcagtgccgaaaaatccggatattccctacggcatgattagccgcgtgcatctctatgccgaccgctcccatggctcgggtgaagattccatttatctggtggcggaaatgaatttctgcggggaagacggggaccagccccatattgtgggaatctttgccggttctcccgcagaggaaccgtgcatgaggctggcggacctggacagggacggcattcctgaactggttctggttcatgaagcgggagcaggagcttcatatatgcgcattttccgcatttcccaagaaccgaatgtctacgacgataagagctgcatctccgcctctgccatgctgaagcaggtgggctgctgccgcacgggaatgggaaccgtcaggctggaggatgacggaacggtggtggtaaagacttatccggaaggaggaaagattccggcatccgtgaaaaaataccgtctggaacagggggcggacggaatgaaggaggtggaataaacaggagcggagcaggggaagccggaataggagggagaagcgcagcggcgtttccggcgcagcgggacgggggtacgctgcgtacatgaaatgggacggaacttccacaaattttcatagacgcggggaataaataggttatgatttttatgtcaatcgggtattggaaaaaaggctcatgccgttatggcgcggagcggcttttccggtatggaaccattttcctattgaattaaagtgatgacggtgcaagaaatagctgaacagagtttgaagagccttctggcctccctgggtttttccgcggatattgaagtaacggaggcggacggcatcgtgtgcctgaatatttcctccccggattcccagtacatcatcgggggagacggggacaggctggacgacctccagtacctggtcaaccgcatgatccagcgcaagatggaggatgcaccccgcgtgaaggtggattgcgatcactaccgggaacgcaacgaggcccgcctgctggaaaaggcccgttccctggccgaacgcgtgcaggaaagcggcaagccgatgaagatgcagccgctgaacgcctaccaccgccgcctggtgcacaatgcccttcaatccatggaaggcattgcgacggaatctgaggaaggcgacggccgttacaagcgcattaccatccggcgcgcctgaagccggcagttttcatgaaggttgcagcggttattgcgtctgtttgcctggcgctggtgacggcggttccgggccgtgcggaagcggaggattcccccgcttcctgcgccgcggctccttctccgccgccgcctgtgctggtggtgtacggttctgcggagcccggcgcggcggaagcccgctggctgaaggcgctccgtccaggaacggaagaacgccgtgcgctggatgaacatgtccgtgacgtgcagtttgtcacagtgcccaaacgtccctccgtgaaggattgggaagaaggcggcagcctgttccgtgctgcggagcatggcgtgcgcgtgctgcctgcggtggttttgcttgattccagggggcgtgtatttgacttggtggaagggggagcgcatgccgcatccctgcgggaaaaggcggccctgctggcggataaggcccggcgcgtgcgcccggtgactttggtgaatgacgttccgaagggtggagaccctgcggaggaggccgccgccatttgccgggcgttggaaccggtgccggcggaagcctggttccgggattatccgggaacgatgaaacgcctggaaaaactgaattgcacggttccggcctttctgaacgcccgcgcggcagcccgccgcctggagaaaaaccgggaaacggcggcgctcctctgcgaatccttccaggcctgtgatgccccttccatccggaaatgcctggaagcgtggcggaaaagggcggatgatccctcccttcccgtggaagaacgccagttgatcctgctctccatggtgcatcccctctgggtccggctggaagaagcgctgtaccgggacgcccacacggcggagagtgaggaggctttcaaccgggcggttgccgttctggaggaagtgcgggacatggaccgcgccagcgtttgcggcaggcgcgcgcaccagctccgggaagagctgaggagggctcgcctggctgccgcgcggtatgattgatgcggttttccggagcttccggaaacggacaggaaggcttcccggttgccgtcacggaatcaagggacgcgttttttcttcgtgattcccttctccacaggaagggcccggcaaattggcttgattttgcccctgtccggggctagtcttcggaccgttatgacagactcatccatcccggacatgatggcggcggcgcgccgtgacaaatggactgaccagcaactggccgccaaggctgtggaactggcggaatccattctgaaacagtcgaatgccgggatgcgcaggaaggagaaaaagcaggcggagcagatggagcgcatgatgaacgaccctgcgggcaaggcctttacgctggcgctggcggaccgcgtgttccgcccttcctcgccggcgcggggcgcggagctgttccgctacctgctggacggctacggtattccccgttatttgtccgccgcggaccggttcgccatgaagctgggggacaaattctccgtacaatttcccggcgtagtgatgcccatgattaccagccagttgcggaaggagagctccaacgtgattcttccggcggaggatggaaaactgcgctcccacctgcgccgcaggcgcaaggccggcatccggatgaacatcaaccagctgggagaggccattctgggtgaaagcgaggcccaccaccgcctccagcaggtcgtggaccgcctggcggacaaggactgcgattatatttccgtcaagatttcagccattttcagccagattcatctggtggcctttgaagaaaccgtgcagctgattcaggagcgcctgcgcatcctgtaccgggcggccatcacgaatgcggtgacactgccggacggctccaaaagacccaaattcgtgaatctggacatggaggaataccgtgacctccacctgacggcggaagcgttcaagcgcacgctgatggaggatgaattcatgcagatggaagccgggattgtgctccaggcttatttgccggactcctgggaggaacaaatgaagctgtgcgcctgggcgaaggagcgggtggagaagggcggcgcgcgcatcaagatacgcctggtgaaaggcgccaacctggcgatggagaaagtggaggcctccatgcatgactgggcgcaggccccatacggcacgaaggcccaggtggacgccaactacaagagaatgctccattacggctgcatgccggagaacgccagatatgtgcagttcggcgttgcctcccacaacctgtttgacttgtgttatgccatgctgctgcgtgagcgggaaggcgtccgggaccatgtgggatttgaaatgctggaggggatggcgaaccatcaggcgcgcgtcatccgccaggcggcggacggcctgctgctgtatgcccctgtggtgctgaaggaagacttccacagcgcgattgcctacctggtgcggcggctggatgaaaacaccagtgaggaaaacttcctgcatgacctcttcggcatgacgccgggctcccggagctgggaggcgcaaaaaaagcggttcttaaaagcctgccaggagaaggacgacgtgaaatacggccccaaccgtacgcagaaccgcgctacggaccccgtgcagcccacgcattaccgggacgcctttgccaatgagcgtgatacggactggtccctgcggcagaatgcggaatggatcaacggcctgattgccgcggaaaaggaaaaatccggcgaggaaattcccctggtcatcaacggtgaggaaatcacgaccaacctgtggggcgtggggcgcgacccgtcccgccacaatgaagtctcctacaaattcgcgtatgcggactttgaccagattgaacacgcgctggacacggcggacaaggcccgcgcctcctgggcgtccaagagcgttggcgaacgcgctgaaatcctgcaccaggcggcgcaggagctgtccagaatccggggggaggccattgcagccatggtgagggacgccggaaaggtgcccacggaggcggacgtggaagtgagtgaggccatagacttctgccgctattatgcggaagggctggaccgcgacggcatgaacgacggcgtggaaatgaccccgctgggtaccgtttgcgtgatgtctccctggaacttccccttcgccattcccacgggcggggtggccgccgcgctgatggcggggaacacggtggtgttcaagccgtccgagctggccgtttatacggcctggcagatcgtccaggcgttctggcgcgccggggtacctaagagcgtgcttcaattcgtgccgatgccgcgcaatgaaatttcccacaaattcctgatggatccgcgcctgaacggcatcatcatgacgggctcctaccgcaccgggaaaatgctgcgtgaactgcggccggacctgcatgtgctggctgaaaccagcgggaaggacgccatggtcatcaccgccacggcggacccggaccaggccgtgaaagatttggtaaaaagcgccttcggccattccgggcagaaatgctccgccgccagcgtggctattgtggaggcctccgtctatgacaacccggccttcttgcgccagttgaaggatgccgcagccagcctgaaggtggggggctcctgggaggtcagctccgtggtgacgccgctcatcaaggaaccggaaggcgacctgctccgggcgctcacgcaactggaacccggggaggaatggctgctcaagccggaaccctcggaagacaacccgtgcctctggtcgcccggcatccggttgggcgtgaagcctggaagctggttccatcagacggaatgcttcggcccggtgctgggcatcatccgtgcggaaaacctggaggaagccattgacatccagaacgactccgaattcggcctcaccgggggacttcagtccctggatgaacgggaaatcgccctgtggaaaagcaaggtgcaggtgggcaatgcgtacatcaaccgcgtcatcaccggcgccatcgtgcgccgccagccgttcggcgggtggaaccactcctccatggggcccggctccaaggccggcggccccaactacctcaccatgctgggaagctgggaggaaaaggcgctcccgcagaaactgcgcacgccgggggaacgcatcaccgggctggtggaaaagctgtgctccgaactgccggactgcgccaagcgcatccgttccgcggccggttcccaggccaagtggtggatggaggaattcggcgtggagcatgacccttcccatatctacggggaaaacaacacattccgttacgtacccgtgaaggggatactggcccgtgtggaaaacatgtctgacgctgacgccgccatcctgctgctgggcgcgaaactgtgcggagcagccctgcacctgagcgtggaggaaggccatccctggattcagaaaatgaacggttactatgcgtccctgacggtggagacggaagccgaactcatcgaccggatgccggaggcagcccagggcgtgaaattcctgcgtggaacgggcatctccgaggctctggcgaatgccgcacgcgcccgggatgtggaagtgctggaccggcccgtgcttgccaacggacgcctggaactgctgggctatttccgggaacaagccgtttccgaaaccgttcaccgctacggcaacatcatcccgcctccgggcagtttcaagacggccggggcgtgaggggagccttgaaccctggctcccaggcggcgtgattatgagtataaagacagcgcaggaaaatgcccccgcagtccaaacggaaaacgccctcctgggaatgaaggccgggcggccttcattggatgaactgccgccgaagccctgcggagggatttttcttgcaagggcgggaaaaccgggcttacccggttgggtaaaagataaactctgccggatacaagaaattccctccggcaaacggtgaaaagttaaagtagcacggaagagggcctgcggcgtttattgcgcccttcgggcggcaaaaaagttgaaatccacaggaaacgcggcctcttctgactggcttgccgctgtttttagcttcttcccgggctttcttccgctctcgtaggcctgttcctgggcgcttttgtttcttttccccattttgtgatagaacgtttccgggaaacgggtatatttcctggaacgtccgcgacgatgcggcaattttccctaccacacatccatgagcaccaaccaaccactgacctcccacggcacccacatcgcctgggttgacttcctgcgcatcctggcctgttttctcgttgtagtggcccattgctgcgatccgttcgtaggcagttttgacggcaccttcaactttaaatccgccgtcttctggggcagtctggtgcggccgtgcgtgccgctgttcgccatgatctccggcgtgctgctctttcccgtcaccatggaaatgggcgctttttactccaagcgcctcaaaagggtgctgattccgctcgtcgtctggtccctggtgcttcccttgctctacttcggctactttgccgcgggcgtgcatacggccagccccaacatcgtgatggacaactacacctggagcgccaccgtcggcaagctttacacctttctcttcaacttcaactatgacaccacgcccctgtggtacgtatacatgctggtgggtctctacctcttcatgcccatcatgagcgcgtggctgacgcaggccaaaaggaaggatgtgaaaatcttcctgggcatctgggtattcagcatgactctcccctacctccagatgcttgccccggcgctgggctatgaaggcaattacggcaacatgggcattctgggcgtttgcgactggaacccgtacggcatgttctataactttgccggcttcctggggtacatggtgctggcccattacctggccaaatacccgctggcctggagctggaaaaagatgctcgccatcactgttcccctcttcctggtcggctttgccgtcacgttcttcggcttcctggaaacgcagaagcacttccccggccaatattccaagcttgaggtactctggtacttctccggcatcaacgtcttcctgatgacctttgccatctttgccatcgtcagcaggctcaggatcaagcccagcccggtgctgggcaaggtggcggcgctcaccttcggcgtgtacctgtgccacttcttctttgtccagtgttcctatgacttcgtgaacttcattggaatgggggggctccccgccgccgtgaaaataccgttgctggcctgcctggcctccgccgtctccctggcgctggtatggctgttgagcctgaacaggtggacgcgcaaaagcattatgtaaaccgcggatattttccgcagggcgcttcgggaccacggcagtcccggggcgccttttcttttgtggaaaagagaataaggcggtttccggggaggggcctgcaaaattctggacgggaaagagggaacaggctaggatattcctgcatcgtgcacaggccctggttgccggagatgtgggctttttaacgcatgaaaagcgcgtctcccggtctcccttccgccaaccccaagctcacagaaaattcccgggacaccggcgatttacgtaatccgttggggttctaatcttgacaactatcatctcttttttacggcctggaatatgtgtgcctccatgggaggttggcgcaaaacacccgttgcgctgttgatactcaagccataggcgtccaggccgtcgcactctcacgagtgcgtggattgaaacctccaacggcgtccaactggtgcatgtcatccaggtcgcactctcacgagtgcgtggattgaaacctccaacggcgtccaactggtgcatgtcatccaggtcgcactctcacgagtgcgtggattgaaactcctaacacgctagcatttaaagcgttataatggtcgcactctcacgagtgcgtggattgaaacagcgatttcaatgcacgtctgttcccggtttgccgtcgcactctcacgagtgcgtggattgaaaccttgtttttccgcttggcaagctttttcaaggtgtcgcactctcacgagtgcgtggattgaaacttcgtaaaaatccccgcgccgtacccaccaggacgtcgcactctcacgagtgcgtggattgaaaccgccgtggcattttttaaacacttcacagaacaagtcgcactctcacgagtgcgtggattgaaactgtttggcatggggcgtttttgctctatccagttgtcgcactctcacgagtgcgtggattgaaacaggtgctgacgtggcattctttcggccaggacgggtcgcactctcacgagtgcgtggattgaaaccgtttttggggcgtcatggtcaacttcgttcccggtcgcactctcacgagtgcgtggattgaaacccttcggaggctttctatcacctcggccagggatgtcgcactctcacgagtgcgtggattgaaacaactttatctcctaccttcacccgcatgatggggtcgcactctcacgagtgcgtggattgaaacaggaaataccttgaaaaatatctcaccggagaaagtcgcactctcacgagtgcgtggattgaaaccctggattttgccaaggcatcccctgtttccgcgtcgcactctcacgagtgcgtggattgaaacctggtctggtagcaaggcaggttggtttggaattgtcgcactctcacgagtgcgtggattgaaactctgcggagagcatcatgcggccatatccgccgcgtcgcactctcacgagtgcgtggattgaaacaataacccatacccactgattcagattaatggaggtcgcactctcacgagtgcgtggattgaaacatctacctggatttccgcgaggtggtgaaggaagtcgcactctcacgagtgcgtggattgaaacttccacgtccactttttgcggcttgccgtgtcccgtcgcactctcacgagtgcgtggattgaaactgttatcggataatctgtttttagatattggcgcgtcgcactctcacgagtgcgtggattgaaacacgcacccgcgccttgtacaccccatcataataggtcgcactctcacgagtgcgtggattgaaacagcagtattcagccatccggctttatcatcatccgtcgcactctcacgagtgcgtggattgaaaccaaaaacgcgtggacgacgcccgcgccagcctcgcgtcgcactctcacgagtgcgtggattgaaacgataagcttgtattccgccagggtgatagcctggtcgcactctcacgagtgcgtggattgaaaccgaaaatgaaagtcccctggcttatatggcctggtcgcactctcacgagtgcgtggattgaaacttttcatcacttccgcgtcgccggaattggtgatgtcgcactctcacgagtgcgtggattgaaacggttccggcggccctatccgtgaaagcatctttagtcgcactctcacgagtgcgttaattgaaagtccacatgtctgcgcggggcgcaagccgctcatgcactgcttcttgaaagaggagcagatcaaagctttattttccgcaaccgtatcgtttggtgtttggtctgttcccctgttattttaagaaaggacggtaagaatccgtagtggaacgggatgacggctctcttccgtttacctctcagattggcatggtttgcagccttttaatgtccgtccgcggcgggttgccgaacatgcgcttgtattcccggttgaattgggtagggctttcgtacccaacgcggaaggaggcgtttcctgcgtccatgttttccacaagcatcaggcggcgggcctcattgaggcggatgcgtttctggaattgaagcgggctgatggccgtgagggtacggaagtgctggtggaagctggacgggctcatgccggcgcggcttgccagttccccgatgctcaacggctggtcgaagtgcttttttatccagtcaatggcttttgctatctggctgctatggctttcagccacgacgatctgtctcaggcgccctccctgttcgtccatcaggagacggtaatagatttcctgccgcaccaggggaaggaagacggggatgtccgcgggagtttccagcagttccatcaggcgttccactgcattgagcagggcgggagtcattttgctgatgccgatgccccggtctgtggggcattccggacgcgtggccacgctgtcgtgaagcatcagttgggagatttcctgtaaatccagttccagcgtcaatcccaggtaaggtttttccgggctggcctccatgattttagagacgaggggaagctccacggaggaaacaacaaaactttgcgcatcatataggtaggcttcgtcccccagcaggatctgcttggttccttgtgcgatcaggcaaagatggggggaaaacatatagctgtgcggttccgtgggggattcccagcggtggagctccagcccgggaatggccgtgctcacctggtgtttcccatacgtccagcctgcaatcattccggcaaggcgcagcggtttccgttgacggcaagcaggagttggcagggaggcggacgtttccccctgttccttttctttttccttcatgaaggcttcatgttattcaaggcagggtgcgggagcaacttcattttgtttcattttgcaggatcaggcaataatgcaggaggaccgggctacctgttttttcctctgcctgttaatattggcagggtccggtgggaacgccggaacaataaaacaggaaagaacaaccaatgaatacgaaatttatcatcacccgtaacgccggaattctggcggcaaccgcgctgggcgcttttgccgtgtccggcagcatggcttctccggcggacaagccctcggacgcggacaatttttacaagagcggccgggtctcccagcaggaggttaagttcaataaccagtatcgcatgaaggtggccgggaacctgttcctgcccaaggacatggataaggaggccaggtgccccgccattatcgtgggccatcccatgggagcggtgaaggagcagagcgcgaacctgtacgccgcgaagatggcggaacggggatttgtgacactggccctggatttaccgttctggggcgggagcgacggagaacccaggaattccgtttctccggatatgtatgcggaggcgttcagcgcggccgcggattatttgggcacgcggccttttgtggaccgggaccgcatcggcgtgatcgggatatgcggtagcggcagttttgccatcagcgccgccaagattgatccccgcctgaaggccattgcgaccgtcagcatgtacgacatgggagctgccagccggaacggtctccggaattcgcagacacccggtcagagaaagaagattctggcggaagcggcggagcagcggtatgtggagttttccggcggacccgtcaagtataccggcgggactgtgcatgaacttcgcgaagattccagtcccattgagcgggagttttttgagttctaccgcactccccgcggcgagtttactccggagggacagtcgccggagcttaccacgcatccgacgcttgccagcaacgtgaagttcatgaatttctatccgttttccgatattgagacgatttctccccgcgccctgcttttcatcaccggggaggaagctcattccagggagttcagcgaagacgcctacaagcgcgccgccgagccgaaggagctttaccgggtgcccagggccgggcatgtggacctgtacgaccgggtgaatatgatcccttttgacaaattgacggattttttcagtaaaaacctgaagtaaggcctggtgctgcccgggagtatcccatggaagctttttcccggtaatgttcccggagcacacgattagagaacggaaggaaaggttttattgggaccgtgtgaacgggagagcctcttttattgcatcattggcagaaggccatggcgtacaagaagagtaagtggatggattttattcagggttctccgctttcccgttgccggggcgcccggtagttccatgggcgcggaatggtccatggatattgtcacttgaagaattgaaaagaaaaacagatggatatattggaaagaatgcgccggggagagttgatacggctggacgatcccgagtacccggtcatagaagagttgatcacgagggccttccgcatcaccggagagttgaatgcgggctaccatgatgccgcagagacgcgggctgtcatgagcgaattgacgggggagttgatcgatgaaacgacttggatcgtgccgcctttttataccgatttcggccgttttacacggttcggcaggaacgcgttcgtgaattgcggctgcacgttcatggaccgtggcggaatcacgattggtgacggcgtgctgatcggtccgggagtgaagctgattacggagaatcacgcggaggaaccggaattgcgccgtcatgtttatgggctccccatcgtgataggacggaaggcgtggataggggccggggctaccgttttgcccggcgtgacggtgggggaaaatgccatcgtggccgccggagccgtcgtcaccggggatgttccggccaacgcgattgtaggcggcgttccggcccgggtcatcaggaatatcaggcaatgacgattcagggcgagcaaccgcagatcccgggaaataacggcgttgaaatgcccgtggagggattaaggcgttgacggatgccggcgccgtgataagaaatggcgtggactccggttgattgattttacctttgcagggctgaacggagagggggcggctgcggttgtccgcagaggcggattttcccggaaggtactgtcgccacacggaaggaggacggttatggcctgggctatcggcaccggcaattttcagcctgaatggttcggagtacctctcccgccgtgcggctgccgttcctgtgaagagccgggagaaatttttttccggaaggagcggagggataaagttcacgggaaagaggggaagtgccggaggggcggcctcctgccgaagagggacggaaaagattttttcaggcaggaggcggggtgcccccgcagcacgtatgacaggacggttgcgcgggttttttgatgccggcatgcccggatgggatgggaggttgttttaaaatgcgttcaccagtagcatgttgagtaatgttttaatgaggggtgttttgcgccgcgccgggagaaggggagaagaagttggatgaggcggccatgggaaacgtcctgattcttgagctttttttctcgcatgctgtcaaaggtttatacagcatggaattgtacgatcaggtagaaagaatagttgatgatggaacactcagtaatttttccggaccatcggaaggtttgcgccctggggcagggaacttggaagatgggaaaatccgccttgagggaagccgaagaagtagaggcgctgcgtgcgggcattgagcttggcatgagcgtggttgacacggcggagatgtatggcaacgaggagttggtgggaacggcaatccgcggattgcgcgaccgtgttttcctggttaccaaggttctgcccggcaacgccagcaggaccggaaccaaggccgcctgcgaacggagcctgaacaagctgcggacggattacgtggatttgttcctgcttcactggagcggtccccatcccattgaagatacggttgcctccatgattgagctgcagcaggagggtaagataaaggcctggggcgtcagcaatatggatgttccggaaatggagcgtttttatgccgtcccggggggagtctcctgcgccgccaaccagattctttataatctggcccatcgcggcgtggagtacgacctgctgccgtggtgccgggagcgccacattcccgtgatggcctattcgcctgcggatgaagggcggctgtcccgcaatccggttctgatggagattgcgcagaagcatgaggccaccccggtgcagatcgcgctggcctggattctgcgccgccccggaatgattgctatccccaaggccggttccgtcatgcatgttcagcagaattaccggagcttgtccattaagctgactgcggaggatgtggatttgctggacgaggcttttccgcctccgggcaggaaggtgcatctggattcctggtgagccatggtgcgggccggcccgcgggcgaaacggggcgcacggattttttccgcatcatcaggagcgccgcaagcccttgcgtcaacttgggcggaagggcgccagcgaacggtttttaacacacgcgtgccctgtggatatgatggggcattggctttttttgttcatggagaccggggaatcgcctgtgcgtctccggaaggggaccttccggagattttttctacttgaaatggaaaaaggaagcagggaaaggcggcaaatctccgtgccacatagtggaaaagggaggaaaacgctcatgaacggtgcatcagaggtgctgccattttctggttccagcctcttccggttgcgaagagggttttaacgcagccgtaaaaaaggccgcccttccggaaatacggtgttccgggaagggcggcccatggtgagggcgggataaaaagcgttacagcggctgcgcgtccgtcctgggtatccagacgggcgtgttctggaaggtgctggcgtagtaccaggagccgcgttccgcgcgcaggatgagcggggtggattccggcagggtgatgaccgccgggctgttcatgtccgccgcgtgcctgccgggcgttttctgggtgacgaccagcagccggtccgccgggatggattccggggtttccgggtacatgatgtagttcatgatggccgccacggtgaccagtccgctgagggtggccaggatggtcagcagcgccccgtgcctgcgggtgacggtcaggagcgccaggaaggtgagcatgacggcgccggacaggatggagatggggccgagcgcatcatggctgatgtaagtgagccactggttttccgtggtattggcggggaggatggccccctccttgcgttcgatgaattgcaggttgtatctggcttccgtgaagtacggggagagttccagcgcgcggcggtagttgagggcggccagaccgggcttgttcatgcggtagtaggagttgccgatgccgaagctggcataggcgcgttccgacttggagaggtccgtatcgttgctttccctgctgaagtagtcaatggccttggcgtattctccctgttcataggcctgcacgcccaggttgtccgtttccgcggcgtttccggctgctccggccacggacagggccaggacggcggccatgatgagcacgggaagcttggcgatggcttttttaatggcctggagcatgtgctggcgttccgcgtgcggcagttcgtccgaagagccggagggcttgaacgccctgtcatcccggagctgaaggatggttttcatttcttcattctgcttggaaggaggaatgtaggattcgatgaagttgccggcggctcgcaggaattccgtggggctggcctggcgcggcgtggaggagagcctccggaaggaacgcatgcgttcccgggccgtgaagctttccttctggactctccggatgtagcggatcagggccatgcccagcaggacgacggcggggatgtaggccaggaagtaccatccccagtgagccggagcggtgagggcgttcatgacggcggcgggcatgatcccgtaaatgtccgtcatttccgctaccggaatggtgcctgccgggggcggcgtggcgggagcggctccgccggccgccgttccggtgatggcggaggccttccattccaggggaatgggggaggtggttacggttttgtactgttgcgtgctggggtcaaagaaggtgagttcaaagggcgggatggcgtccgtctgggcaatcgggcgcatcatttgctggaattccacggttccctggatggagcgcgtgttctggcccgggtccagcttgttgggcgggtaaagcttccagttggaagcgtccgtgagggccgggcaggcaatgctgtggatgttgcccgtgcccgtcaccttgattttaacggtgatgggttcattggcgctgaggtcccgggcatccgtgctggcggagatgcggaagtcccccacggcgttggtgaaagaggcgggcgctccctccgggagttcctgggccgtgattttcacttccggaatggacatttccaccagtacctccgagcggatgaagttggcgatgaggggatccgcttccggcagggcggcgcgtgccgtgacagtgcccgccgccgtgacttccccggcgcgcagcgggaatagagtgctctggaaggtcatgacgttccagttgacgcctttatagagcacggagccgcggggctggccgcggagcaattccaccagcgtgggttcaaagcgccatgtagccaggttggaggtggtgatggtgggcgccgtgtattccagaatgtattccggagcataaattttcagttcgcagcggtccggctggtggacatagggcttctggttgtccacatgccacagcatgccgtacggaaccgtagtgccgttcaggttcagcgtgttccacttgatggcgctgtacgggtagacggtcagcgtctggggaagcgtggtataggagcggccgttgttggcttgcagggtcagggacgggatttccacggtgcccacttcgtccggagttacttcaatagccatcaggaaggcggactggttgggggaccccggccagcggatatagttgccctggctgacccagcgcaggctggcgcccttcaccctgggaagcgggtcctggcgggcgatgctgccgtccgtcaggatgatgaagaggcgggtttgttctcccggcacaacggcgtcggacagccaggtggtgaccacctgctgagccatgagcgtgacggtcatgcagaagaagagcgaaagaatggcgagcagttttttcatcatgttgcgggatatgtttgaagggttggcatcgtggatgcgggcggaacgggttaataatccttgtccggaggaatttccggcgaacgctggggaacggggcagccgggttcaatgtccctgcgttccatcaggatggctcttgcctcccggcgttccttttcctccttgctttccttttgcgtggctaccggtacgggcttgtccccttccggctgcggcttgggctgcggtttttccatgccgggcgtttcaggcagcttgtctttttccggagaggaggggagctgggcgtttttcatttcattttcgtccctcttgttttccttgcccgcggcgttatccttgtcttggtccttgttctggtccttgtcttggtccttgtcttggcccttgtcttggtccttgtcttggtccttgtcttggtccttgtcttggtccttgtcttggtccttgtcttggtccttgtcttggtccttgtcttggtccttgtcttggtccttgtcttggtccttgtcttggtccttgtcttggtccttgtcttggtccttgtcttggtccttgtcttggtccttgtcttggtccttgtcttggtccttgtcttggtccttgtcttggtccttgtcttggtccttgtcttggtccttgtcttggtccttgtcttggtccttgtcttggtccttgtcttggtccttgtcttggtccttgtcttggtccttgtcttggtccttgtcttggtccttgtcttggtccttgtcttggtccttgtcttggtccttgtcttggtccttgtcttggtccttgttctggtccttgttctggtccttgttctggtccttgttctggtccttgttctggtccttgttctggtccttgttctggtccttgttctgctgctcttgttgttttttcttttcctcttccaatttcttctttaattcctccaactgcttgcggtattcgtccagagatttgtcgtaacggagcatttcctccttgttggcggccgctccttcatgggagccgtaggcggagagggcgtcgtcaaagcgcttgacggcttccttgacgtgttctttcgccacgggtatttttgccaggcgggcgtcaatttccttgatctggtcatcaatggaagagggctgcgcctgcggttgttccccttccggccgggagaagatcatggttttacgggcctgggcggcttccaggttgccaaggttgaagtgggaatccgcctgaagggaggctttgggagaaaggagcgcctgggagaatgcttccgcggcttccttggggttgtccgctttttgttccaggcagcctttggcgaattccagggcctggcgcgtttcttccgccaggtccggaacggcgagcatttcatcaatggccttgacggcttcctctgtctttcccgtccggatcaggtccgtgacgttgtccagggcgctcgtgtccgcgcgcgcttccgtgcccagcagtccggcgcagagcagggttgcggcggccagggcggtcatgccgcggcgtccggaacggcggaaggagcgccagcgggtacctgccagaagagtgaggagcaggcagatgagggccggaacggcaaagatgacgtagcggtcgttcggcacgcggcgcacttcctcccggccttccgtgatgtccaggcggtccgcgatgtccctgacgaagcggttcagcgccgctccgtcggagagctgcacatactggccgtccgtctgccgggccaggtattgcaggctttccggattgagcttggagacgacatgctggccgcggcggtcccggtacaggccggagggggattgctcatccggaatggtggtgccgatggtggtgccgatgcccgccgttacgatgatgagctggtgctgcctggcggcttccgccgtcttgtaagtgatgttgacggtgtcttccccgtcgctgaggatgaccagggcgtttttggcgtccgcctccttgtcccgcttgaaggtctggagggccagccggacgacgttttccagattggtgcctccctgggagacccagccgaattgaagctgttcgatggtttccttcagcgcgttgtggtcatgggtaaggggcatgagcaggacggcgtccccggagaagatgatgatgccgaagttgtcccccggcagggcgtccagcaggtcgtaggcggcggttttagcccttcccaggcgggtgggggaggcgtccttgctgagcatggagcgggagcagtcaatggcgatgaggatattgcgcgatttgggaatctcctttacctccgtgtagccgtccaccggacgcgcgatggagaggatggcgaagatggaagccagcacggcaaagatgacggggagcacccggtgccaggtggccggagcgtgaaccagctcctgccggtattccggggagatgagcacttcccattttctggaacggcggcgccacagccaccaggccgccgccgcgagcagggccgggaggatgagcgcgtacagaacgttgggataaaggaaggtcatggcgggaaagggatggtgttacggggcgggggccggtttgagcacttgcagggagaggcccagaagcgtcagcgcggcgcccgttacgaggaagtacatgaagtattcttcaatgtggcggacggtctgcaccttggcctcgcttttttccagcttgccgatggaggcgaacgccttgttgaaggaggccatgttcgtggcccggaagtgctccccgcccgtgagctgggctattttccgcagggtgggttcgtcaaattcgctctgcaccaccatcccgttcgccagggtgccttcttccgtgcccacggcgatggtataaatcttgatgcccagcttggccgcgttttccgccgccaccagcggggatatctggccggagttggaggcgccgtccgtcaccaggatgatgattttggatttggtgtccttgcggtcgtccagccgggtggccgccgccgcaatggcggagccgatggccgtgccgtccgcctggatcatgcgaggatggaagtcccggatgatgccgttgaccagggcgtggtccagcgtgagcggacagaaggatttggttttcccggcaaagcccacgatgccgatgcggtcgtccggacggctgtcgacgaattgggtgatgacatgcttggcggccaccaggcggttgatgggcatgcggttgaggaccatgtccggcgtctccatggagtaggagaggtcaaaggcgatcatgatgtcaatgccgttgacggtgcggaaggttttatcctccactttttgggggcgcgccagcgcgatggcgagggccgccgccgccagcacgaagcaaatggcccctatttttccggccagggattggggattgcgcgccagggaggagatgaagcgaacggtcgggtaggtgatggagccttccgccccccgcctgcggcggaggataatgaggcacaagatgaagggaaggacatagagccattcaggttgtgcgaattggaagtgttccgtcatggtgtgctagcgttggttggggcgtggggaaggttttttgacgacgaggtccgtttcctccttcgtgcggtgtgcgtccgcttctatgtcgttgatgagttggaccgtgtcgtccgccagttcgttgaccagggagtcgttttccggagtgtccggctcatatttcagggaggccatgcggtccagcaggtcgcgcgtgggaccctggagttccgaggggagcgcggtgagcgcgtccgcccggcggttgaattcctgctgggtttcatacagcgccgggtctttggtttcccccaccaggtatttccggaggagcagggagaattccacggcggcctgcctgagggaggggtgggtttcccggagcatcgtgatgtcccggatagcggtttccgccgggctgagcggcgcggcgggggtgcgccctttcctgcggatgagcacgatgacggctatggcgacggccagcaggatggaggcgagcatgatccagatgccccacgtatcccagaagcccgcttgaaggtaggcgtccggggactgcgtttccatcagcgtagggaaggccggcggttccggaatggccgtggggggagtctggaaggtggcgggtgctggcatggctggcggagaagggtttagcgtgagaatttgcgggacctcctggtgaagagggcctggaggggcggcatgaagttgtccgtggtctggaggtccaggaaatcgatgcccaggcggcggaagtcctgcgtccatttttcacggtgcaggtgcacgacgttggcgtgggcttcccggacgtcctggcgggcgaggttcaggaacatgcttttgccggtttccgggtctttcaggatgacgcgcccggcgtccggaaggtgcagctccatcgggtccgcgatgcggatggggatgaagtcgtgcttgaagttgagctgtcccagggcggccttgttgtgctcgctccagaagtcgctgagcatgatgaccatggctgcctttttctgggaaaggacgagctgccgggctacctccgcgatgctttgatccgccccgtcgtttttactggctacgatttcacggacgatgcgcagggtctgcttgatgcccttggccgggggaatgtaatgggagtggctgttcccgtaaatgagaaggccgcacttgtccccgctctgggccgcgctgaaggcgagcaccgcggccacttccgccgcatagtccagcttggaagcccgggccgcggaggaggcgtagtgcatggagccgctgacgtccaccgccagaatgacggcctgctcccgttcctcccggaagcgacgcacgaagggggagttcatcctggccgtcaccttccagtcaatgaagcggggatcgtctcccggcgtgtattcccggaagtcgtcaaagtccagcccctggccgcggaagccggactggtattgcccggcgaagttttccgtggccagatgcctggcgcgcagttcaatgcggcgcacgcgcttgagaatgtctgaggctttatccatgaagtgatcctccctgtttgaattcaatcaggttccggtgaggcgccccgcgggggctgaaggataagggcggacgggggagccgcctcctgccgtcacggcacgggaaccttcgtcaggatgtggtcgatgacgtcgtccgtggagatgttttccgcttccgcctcataggagagcaggatgcggtggcgcaggatgtcatgggccaggtccttgatgtcctgcggggtgacgaaggagcggtggtgcatgaaggcgttggcgcgggccgccagggccaggttgatggtggcgcgcggggatgcgcccgcgcggatgaggccgcgcagtttcacgtccaccgtttccgggaagcgggtggcgcgcaccaggtccacgatgtagccgcgcacggcgtcgtcaatgtaaatctggttcaccaggtcgcgggaggccgccacctgttccggcgtggtgaccggggaggtttccggcggcttggcggagctggccatgaggtccagcacctggagttcttcttcgcgcgtggggtaggtgaccagaaccttgaagaggaagcggtcaagctgggcttccggaagctggtaggtgccttcctggtcaatggggttctgcgtggcaagcaccaggaaggggtccggcaggcggtaggtggtttcccccagggttacctggcgttcctgcatggcttccagcagggcggactggaccttggccggggcgcggttgatttcgtccgccaggatgagattggcgaagatcgggcctttcttggcagtgaactgcctttcctccggattatagatcatggtgcccagcaagtccgccggcagaaggtccggcgtgaactggatgcgggcgaactgcgcgtgcagcgtgcccgccatggcttttacggagagcgtcttggcgaggccgggcacgccttccagcaggacgtgtcccttgcagaggaggctgaggatcaacctgtccaccagcgcctgctggccgatgaccaccttgcctacctccgttctgagagcagaaatccacgatgagttcgcggcgataatttcgttgaattctcgggtgtccatgattcttaatagcgggtgagacagtctgccgggcgcttgcgttgaaaaattccgattatttcccaagggcaaatccggttttcaagagaaggtcttcccggaaatggggggccgtcatctggaagcccacggggagctccatgccgccttccttcacggttccgcaggggatggacatggcgggcagcccggctaggttggcggggatggtgtagatgtccgccaggtaggtctggaggtggtccagcgcggagtccccgattttgggggcgggggcgggagaggtggggcctacgatgatgtccgccctggaaaaggcttccgcgaagtccctggcgaccagggagcggaccttctgcgcgcgggagtagtaggcgtcatagtagccggagctgaggacgtaggttcccaggatgatgcggcgcttgacttcaggtccgaagccttcttcacgggtgcgtgagaaaagttccaccaggccggcggcgtcttccgcccgcttgccgtagcgcacgccgtcaaaccgggagaggttggaggaggcctccgcgcaggcgatgatataataggcggccaccacggcgtccgcgtggggaaggctgatttccaccagttccgcgcccaggctttccagttgcttcacggtgttctgcacggcctcggaaatgcccggatggttgccggaggtgaaatattccgcggggatgcccactttcaggcccttgacgtcacggcccagcgcggcctcaaagtccggcacgggctcgtctgcggacgtggaatccttcgggtcgtgcccggagatggcctggagcaggatggcggcgtcttccaccgtccgggtcatggggcctatctggtccagggaagaggcgaaggccaccagcccgtagcgggaaacgcgcccgtaggtgggcttgaggcccacgatgccacagtgcccggcgggctgccggatggagccgcccgtatccgaaccgagcgcggcgatggctgtagcggacgcgacggcggcggcggagccgctggaagaaccgccggggatgtggtccggagcgttcgggttgcgcgtgacgccgtaggcggagttttcaccgctggcgcccatggcgaattcatccatgttcgtgcggcccaggggaatgccgcccgccgccttcagcaggcggatggaggtggcgtcatagggagaagcatagggagccaggaggcgggaggcgcagcgtgtcggctggcccaggacgttgatgttgtccttcacggcgatggggatgccggccagggggctggacgtatcggccgcggccgcggccttgagggcggcctcgcggtcaaaggagatataggcgttggtggtccggtccgcctcaatggcgtccgccgtcaggttgaccagttcggcgggggaaagttccttgcggcgcaggcggtcgcgccactgggccagggtgccttgaatgcttgacatggaaagaaagggataagaacggttgaaacgtgaaaagggagggaccgggaggatgtcaggcggattccaccaccttgggcgtgcggaactgcccctgggactgctggggggcgttggaaagggcttcctcctgggaaaggccgggttccggaacgtccttgcgcattacgtccatcgtgggcaggggatggttcatgggggcgatgcctgtgacgtcgtaggattccagcttggtgatgtaggccaggactttgtccaggtccttggaaaagagggcggcttcttcctccgtcaggtcgatgcgcgccagtttggcaatgtaggctacgtcgatttggggcgtgctcatgatgggaacgtgcgtaatatataagagaaagggagggtgaggcctattgctgttccagcaggcggacgatccagcagaaggaggcggcgatggcgcagaccagcaggcccagcagcatgaagttttcacgcagctcccgcctcatgttggtggcgcggccgtcgcgggccaccacggcgcgcagggcgcggttctgggtgccttcccgcacgcggtccggcgggggcatggtattgcggtccaggcgcatgcgcgtttgctgggccggacgtttgagagaggcttccaattcctggatgcggttctcaatttcccgtgaggcgcggtccagttctgccagttcggaggaacggcgtttggtctttcttttaatcatgatgcggaggggctgaaaatccagatgaagaagaggatgataagggcaatcaggagcaggggaaggtggaaggaaaggccctggaggaactgagtcatgaattcgcgggagctgatgcgcactttgctggaacggcgcacgcccgtgagcaccttggtgtgctgcatgcgggcgcactgctggacggcgtccgcgaattcctcctcgcagcggtcgatgacctgctggccctggttgatgaggttgtccgtgttttcaatgggccattcgtccgggcgcacggtgctgagcattttcaggctccgcgtcagggccatgtgaatctgctccagttcattgctttcctggcgaaggctttccacctccctgccgatgaggtccgcggcgttgaccatgcggtcgcccagttcgttctgctggtccatgaagcgggccttgcgcaggtgggtttcctccaggcggcggcgggagctttccacctcctccttttccttccgcagttgttccagtcggagctgggcctgttccatgtcggcatccacctggtcgtcttcctggggatggtagccgggatcggcatccatgcggcggtattggggattgcttggtttcatacgcggtaaaaatgatgcggccggtgtgcgggattgcagcattcccggccggtatggccgtgccggggaatccctgcgcgtgttattatttaactttcacaaaataaatcaagccaagaagaaggtaaaaagtgatttttcaagtatgtttccggcggggaatgccggggctttttttcttccggagccgtgcgtccggactgtcctccgggcggcatggcgccccgctttcccgcaaaggtggatgccgtgcactttttttatggtcaagggcatggaattgctggtatgtaagaaacatgcagtctgacacggtagaatgtaagccgaccatgtggtttaccggcagggcggttatcatggctctcatgttcctggggttcggagtgtatttttattacgatgcttccaccgggtatccccagaagaacctggagtttttcatgcacaaggcgtttgtggacgcgggagccctctttgaccgtgaggtgagcgggaacggggcctccccgcaggactgggagcgcaccgttctggagcgcacggttgaattcccggaagggtaccaggtcccgtccggcgtggaccgggacgcgacgccgtggcccgacgttctggcggattacaggctgatgtccgcccccggcaagggctggagcgccgcgtggcaatcctattccggagaaaagcgctaccccatcaagccggtggaccacccgtatgacgcctccaagatttttgaacaatgggtggccggaagcatctgcatggtgctggccctggtggcgctgtttttcctggtgaggacgcgcggcaggaaaatggccctgaaggaagggcaggtaacggctgccggcagggtcttccgcgtggatgacatcgcccggctggacttgcgcagatggaagatgaaggggctggctattgcgacgctgaacccgggatgcggaggggaccggatcaggctggacggcctgacctacggcggcttccggaaggaggattcccccaataacgcggaagatttcatgaaggcccttctttccctttaccggggtgaggtagttgactatgaagaagctccggagtccggcggcacgcctgcccggaaggatgacgaggatgccgtatgagcgaatcccttccaccggaaaagaaggcccgtgaccgcgcgttcggcatcgcctgctggacgctgggcgcgctggcgttcgtcctgctgctgatggtgggcgtctccttcagcctgaccgcccgcaccgtggtggtggaaaaagtggtggaaacgcccgtacccgttccggtgcagcaaaatccggaagggccggcggctgttgaagaaggggacgaaccggatacggcaggcattgcggccgttccggcgggttcttctgaaaaaccccgttccgtggaggaaatgctccgggccgccgatttgtcggatccggcgggcgacccggtccctgcggcagtggcagccccagtcccgggaggggaaggcgtctccggccagtcacccctgccggctgagaacccggcggaagccatgccgcccatgacggaggaggtggcggagctggtcaaggcggcgcggtatgcccagattgacggagaccttaaagtagcggtggtgaagctggagcaggccatgaggctggagccggacaacccggtggtgctttattactacggcctcacctatgaatggctgaggaatgcggataaatcccgggaattttttctgaaagtatacacccagcgggaaaaggcggggaaatactttgcgcgcgcggcccagcacctccaggccggtttttccagccctgcggacctgcggggcgatatgtccttcggcaccattctggaataccgggacccggaatgcccagccggggagcgcgtcaagctgatcgtacccatcctgatgaaggatggcctgaacgtcaggccggaggacctgcgcgtcatcgtccagttctttgacaaggtcaacggcaaaaaggtggaaaaaacgcacgctccggaaccctcctcgcggtgcgtcacggaacctgcggactgggcggacggagaggaaatcatggaggtgacctactatatgccccccctgacggaggaggagacgatcgcttacggaagcctcaagtactacggctacaccgccaaattgtactacaagggtgaaccgatggattgccatgcctccccgcctgtgctatttttgctggaacagatgaaccagagttccccttccggcatgcctgaaatttatgacggcggcctgcttcccccggtggaggcgtctccggtttccgactcctatgactccctgctgcctccctgatgcctgaatcgtccatgttcgacctcccccacaacttcggcgactatacgctggtggcgttcattggccgcacgcggggggggatgctctaccaggccatccagcagggcatggaccgctccgtgttcctggagctgctggagccggacaacccggaaggcgtgggcgtggaggattttctgatgaaggcccgcacgcgcgccgccgtcagcgcgccggtgctgggaaccgtctatgaggcatcccaggcccaggggtactggttcgtcaccagcgagcaactggggggggcctccctccagtccatgctggaccgcgggcagaccctgtccatgaaggacctgctgaaagtgattgaaacggtcggcggcatgtgcggcaggtatgaacgcctgcaaaccgccttcaacgtcatggagccgcgccacatcttcctggatgacaaatccgccgtgcggctgatgaatacggccatgcccggcgactttcatgaagaaatatcccgtgcgcagatgaaacgcctgggggccgacctgctgcccctggtgatgccggacgtgcccggaaccacccgcatgcgcaccctgctggaatggatgcgggagggccagaacggcaagccgatgcagtgggaccaggtcatggagctgattgccgcggtccgcgaacagctggggctttcccctcgggccaccacgcaccgctataccgttcccgtggaaccccgcagaaactccggaaaatggatgctctggactggaacgggcctgctgggcgcaggaatagccgcggctgccgtttttcttttattcccccgggaggaagcctccgcgcctgctccgcccccggcgccgaaacactatccggatttctccgccagcgaccatacggaagtccgcgtgaaccttcccggcggcggggaactgatcgtgggggcccatgaaattaccctggaatcctaccgcctgtttctggaccagtgggagcgccttaccccggaactgagggaggaatactcccatccggaccagccggacaagcagaccgccacccatatccccgaggactgggaagccatgtggaaggcggcctccactccaggaggcaaatggaagggcaggaaaataacgccccgctcccccgtcgtcaacgtcaccttctgggatgcctgggcatacgcgagctggaagcccgtggcccccggagagccgcgttaccgcctgcccgcgcgcggggaatggatggccctggggaacatgctggaaacgggtgaaaagggagacaagaccctggtgattgacagatacagcaatgattacgacttaaagacgggcatttgcggcatggcttccggcgtgatggaatggacctcttccatggaaaaggaccccgcgcgcgtgaaggagccgccgggcccggtggcctgcggcggggactggaggcagcccggcatcaccaaccgggtggaatacctgcgctcccgcggtgaaagccgggacaacctgggcttcagaatcgtgcgggacgtccgctgacctgtttaaaaacacatactcgacaaaccaataccatgaaacacatccttgcaatgctgctgctggccctgatgggggcgtccggggccctggcccagatctatgtgaaagtagttccggaaaagaaaaccttcctcagcggggaggccatgtacatgaggctgaccatcaccaacaactccggcgtgcccgtggaactgaaaagccaggaatattcctcctggctggacatccatgtggagcactccaccgcgggcgcggaactcccccagtccaaattcgccatgttccctccgctcaaggtgccggccggcatgagcgtctcccgtaaaattgacctgcggcacttctatgacctgtcacgtgaggggaactaccatgtgcaggccgtcgtgaaaatgcccaaccagaaggacatgttcgcctcccagaaatccctgttcgccgtccggacgggcacgcccatgtggtcccagaccgtagccattccctccagcgccaagcggtgcaccttctccatctgcactattgccgtgcgcggaatccagaaactgtacgtgcagacgaaggacccggatacgggcgtggcctacaatgccgtatgcatcggggactggctgggcaccacccgcccgcagtgcatggtggacggcaaggcgaacgtgcacgtcttcttccccaccacgcccatgctgggcgcgtattcccgcatcaactaccgcggaaccatggaaaagctccaatactacaaaaaggtgatgggcaccccctccatggtctttctcccggacggcagcgtgcgcgtgacgggagccgtccattatgaccccaccgtgcagcccaagacggtgccggacgccgcggacgttccgggcatgtaatccgcccggtgttgccggttgttgcgcgggaggaaaaacaagaaaaatggacgccgggccgttccctgcgccggaaaggagtggaagacggttcaggaatccccctgcggcttcctttccggctgcggcgcgtttttcaggatgcgctgcacgctctcctgcaccacgctgatgggcagggcgtaattttccgcccggttcactctggcgatgttcatgccgatgagctcccctttcaggttgagcagcgggccgcccatcagcgtatgccgggaaggggtgtcatgctggaggaccatcggaaaatcatccctgcgtttgctgaagcccccgctgatcaggtcgttggaatcctcgggagcgtcttcccccagggcctgccgccgggagcccagcgtgatggcgtaggaaagctttttgcccttgcgcctgaccttcagcgtcactttttccccgatctccttcttggacaggatgggggaaacggcttccagcgtggtgatgggcgtgccgtccacctccagaatctcgtctccggccatggctcccgccttggcggcgggaccgtccttgacgacctcctgaatggagcagggagtgccgaaaatcacgcccatgtaggccgtgtctccgttcgggatgggccgccgcgccgcgcttagggtgcccagctgggggcgcctggaagtgcgggtggtggagccgttgctgaccaccatcatgcccatggcggcctcattgctgacggggccgggggcgggcaggctggcggcgtccaccttcaccacggcaatgtccgtggccgggtccgtgccaatctccttgaaatggccgtacttggaggaacctatccggaccaccaggttctggtggtaatggagttccgaggccttggtggcgatgtagccgtccggactcagtacaatgccgtaaatcacgacgtcatggccggaaaagaaaaccgcgctcaaatcctggagccgttcccggatgggctcaatggttttcagaacggttttcccgttgatgcgctgttcaaaatccaggctcccgttaaacccttccgccagggcggagggaagaagggaacaggccaggggcagcaggcaggcgcaggaggagagtttcatgaccatggagggaaaaagctagccgtcccgttccggtgacggaggcaggggggcctttccgcctgcgggagattccatcagtgcgtcgaaatccttcatgggaacgtggagattgtcttcaagcccggaacccacccggctgtgaatgccgatcaattccccgttcaggttgaaaagagggccgccggaatccccgcggatcagcttgcaatccgtctgaatgacgccgtgcttgagggaaaccaccctccccaggcgcaccatcgggccgcgtttctggtccaggccgcctccgtgccccagcgcgaacacccagtcccccacgcggggcagtttctccgccttctccacgcggggaaggttcttgttcaatttggtcgtgatttcagccgttccggcgtccgaatcgctgttctgcgccgtggtttttcccggcaggcgggtgccgtccggcaggatgatcttgagcacggttccttgtttatcaacgacatgggccgctgaaaaaatcaggcctttttccgaaaccagaatgccggtgccgctgccgttgttcacttcaatgcagaccagggcggggagcacccggggaagcacctgctggagctggtgttcaatccgctggaggtcctccacggactgcggcgtggtggaaaggattccggcgctgtcggcggactgcgcccgcgcctgcggagccagcagggccgctccgcagagaatggcggaaaaacagggtttccggaaagccgtgttcatgattgccggggactactgttcagaggcgggagcttccgccttctgctggtctgcctgtccgcctcccaccagggaatcgtgataatacacgccgatgaacaggcccgccagcgtgatcagggtaatgagcaattctttcatgccgccacagcatagaatgtgtctttcattctgacgagagaatttcatttataagccacactttgatgcagttcggcagaaaaaggatggatggcgtatggggaaattgccaaaataaaggttgctttttcccgcaacgggcgtataaacctccccagcggtcggttccggtccgctgacccatccaagcggatgtagctcaggggtagagcgcaaccttgccaaggttgatgtcgtgggttcgaatcccatcatccgctccatttttaacttcctaatttcaggaagttttttgttttcagagaataacaattgcgggccattctaatagtatcctattatcccgagtaaccggaattatcgtcaaaaccgttactgcctgctgaaacctgaatgttacagtcaataaaatcaaggctgtctgttgtatatttagaaaatcattgacgatgaatgttttaagatagggtggagaaatatcctggaggaagttgacgcttcatgcaggatgctatttttctgcaacagatacaggatttttttgaagtggcagcaatgattgctgtgtattcggaaaatggaggacacgttaaaccaggggatggctggatcagattcctgttgtcccggctggaaaaaagggctcctgtggaaacaccatagaagccatctaaccgttgaaactgtcaaaatccgggaagaccgcaggcttttcgcgagtgagaatgttttcggagttaccatcatggatatgaaggcagcagagtcgtcatgccacttcattacaagtaacaataataaacaaaaccatgaatactattaatattctcaatggagtcaccctggcatcccaggaggaagtaaccggacataccgggaatacaacgatgcatcttacggaagaagagcgtacggcctggaattccgccgccgctattcctgacgcatccggcacttacaccggcaacaacacgcacgcaggcgtggaaacattcaacggggctgtcgttctgaacggccccgtaacatcggacgcactggaaaccgggcgcatgctcgcgaaggtgacggcttgttcctgcatacctctgataagcgccttcaacgcgacggttaagcagaaggggcctatggggttcaatatctccaggcctgccgacggaaggccggtaaaagtgggaggcaccggaaacccgtggggatggtggagcaaggacaaggttgtcgtacaaatcaattttgttccggatgaacgggccgtttttgaggtgagctcatgcacgtttgcggattttaccgctcctccggaagatcattatgcctatgcccataccatacggcaaacaggcaatgccgccggcatttatatcagtcttcaaatcgacagtgctttgcgcaaattccgggtgaaatatcattccaggctttcgaattccgccgtggctccgggggtgctgagcgtttatgaatgggatatgccggaggaattttacaatgttaaaatggcacgcctcatttatgcctaccgccaccagtatctggacgtgtattacgtgacgccctcaggagaactgaagcttatcgccgctacgccggcctcacagggttacgctatcactgaagctcaattgctgtttcatggtaacagtgaaatttattccgccatagcgcacgtggaagataacaagctgagggactggctcggcaagcagccgcttccctattcccgttccaaatgggttgagcgcaattcgaatgctcctttatccggtattgatctgccttctgccgggggaagctcttcgttgacgctgaattccggcgccggttctgcatggacgctggtttcaaagcccgactggctggacgcaggtgcggagcattgggagaacggcgctgtcgtgaccgtatcagccggagctgcggaagaaacgcggcatggctcgctcatccttgcgacggatggcaaccatgaggcggccggagtcaaagcctatgaaaaagtcgtcatcacgcaaactgtccaagcgtgaggcaggcgtaaataacggtcatggcctgctctggactgatggacagtaacgcttgaagcggctgtccgaatcaaacgacagcaggaacattggttcgcattcagacgggcggcttttagccgtccgtctttttttggagtacggaagatgaaggctcaaggctgcggttatttttccgtttcaggaaatgctttgccaggaagctccggaccggttcatcgtagaatttcaggcacagccaggccagcaggatgctcccgatgacgacggccagggcaccggggagggattcagagaaggagaggtctccgtttttcacccacgcataatacagatagatgaacgggtaatgcaccatgtacagggggtaggagattctgcccaggaaccggcatattttatccgtatagggatcagtgatttttccggaagcgccaaagaggaggataagggggaagaagaccgcgaagcacacggtttcatagaggctgttcatccagaaagcgtcttctcctcccaggcggggcatggccagcaggatggcgagggagatgccgcatagccagaaggaacccttgatgttgaagggcttgaacaggcggaacagaagcagcccggcggagaaggagtacagcaggcgcagggagccgcctgtccattccgtgccggtcatggcgaagccggagcatatgtctccattgggcccccagaagctgaaggaagccaggccgcatccggccaggatcaccagcgccgccagggagcgcgtggagagtttccggatgaacagcgcatagaggaggttgccgatgtattcaaagaatagcgaccagcttggcccgttgagcgggtacatctctcccagtccccggatttccagaccgggaggcgacggaatcagcaggacattgacgaaggtggcgaccagcagggagatgaccgtgacctgggacacatcccatacggaacagccctggaaataaaagatgagcgcgccgatgaccgccccgatcgccaccatgggctgcaggcgtataaggcggcgcttgatgaattccccggtcgtcatcgttttccaccggttgtcgtaggcatagccgatgacaaagccggacagcatgaagaagaagtcgacggccaggtagccatggttgatgatttggtccacatggctggtggcgtaggcttcaaagatatggaaccacacgacgacaatggcggccaccccgcgcaatccgtcaagaatgtggtagtgatgtttttcacttccgggtgggatgggagagttctgtgggttcgacataggagaagctgttttttaatgttattttcgttttgctttgagagagtttccgccgtatcagcccattccccgctacggatagccccgtacaggggagaaatcatccggaggcgcagttttcgcgttacctaatcaaataccattccaccctgcaagttctttcatccattgtcctttatcatagggctttatagggggaatagggggaataggggggaatagggggaatagggggaatagggggaatagggggaatagggggaatcaccgccgggcagggagggaagacggctttggaggcgggagtggatggggaacagggagcgccttttcctgtatgatggggcagaaggctaccccttgcggtagttcgcgagcgtttccacgtatattccggagatgctgcctccctccatgggggcaatatccttgaacgcgggattgaggggctggagcaggtattccgtttttccggtttccgcatttttcctccggatcagttttttcagggtcactccgcgtccgtcgttgtattccacgatggttcccggtttcgggacgggcggggccgtatggcgccgcatgactaccagcgcgccgtccgggatgaggggttccatggattttccttctacgcggaccacgtattcgtttttgcctaggggcctttccatgtagatggtggacgggacggtatcgctttccgaaagggagcccgcggcgatgttgccgacaatctgcgtgctgtactcgcgcccggcatgtccggcaagggacgggagttgttccgccaagggaatgaaggagctttgctccgtccggagctggcgcacgtccgccgcttcatccgccagctcggtcagccactggcgcaggggcatgcccttttcagaagcggccctttcgtatttccgcatgcgttcctccgtgatttccagcacaaggcggttggtctggatagcctcattttccggctgagccggcccgtattgggacatcagggagtggattttcaaaatggcgttggaggggaaggggccggagggggaaagccagttgttgaccgttcctttctccgtgccgcattccctggcgagccagtcacggtcctttccgatggctttcagccagtttttcacgtccccttttgtcggtgtcatggcttgatgatacacgattttcgtgaattgtcgatagaaagaagtaaattaaatccgtgaaaaatatgttgactgattaacgaatatcgttaaaaagaagtcatgaagtacatgcctttggacatttccatgatgaagccggagccgttcccgtattccgtgatgatgaggtccgacctgcatcccaaaagacagccctccggggaagaaggatggcgcggccgcctcggggcagtctgcggcgcactgcaaacgctggtccgtcaatgcagggcaaaggcggaacggcagaaaatggtgatgaccgttctttccgtcgcgggggcttgtgctttcggcctgttggccgtcggcgtgttctggctggccgtagaaatggacaattccgatttgcaggcatccaagtcttcctgttccataaggccgtaagccggaccctggccggagttcctgagcggttttttgtggcgccgctcccggaaataaacaggggccgcgtttgatgaagccgggtccgttttcccccggttgaaacggcttgcgaaagcatgaaaggttccagtggggaaccggagtccggatgagcttccattgttgcggagcttctccgtggcggtggggggaatgaatagaaatcggctcttttttgaggaggaaacggcaggggttaattatttttttgtgtcggaaatatttggtaataagttatttgaaatgaagataaaattatttttaagatttttctttcattagagcaggtgtaaccttttagatgataggtagtgtgttgcttctcgtttccggacgggtgttccgggagtccgggaagcggcccttaaaccaacctgtcatcatgtcaaaccatacccattccgcctttctcatgcatgtgcccacccggcttcttttcggggccgggcaactggagaacctgcatgcggaagcattgccgggccgcaaggccatgatcgtcatttccaacgggaagtccacccgggccaacggttatctggaccacctcacggggcaactggacaaggccggaatcgcctgcgccgtctttgaccgggtggagcccaatcccctgaattcaaccgtcaatgccggaggccggttcgcccgggaacacggctgcgattttatcatcgccctgggcggagggagctgcatggacgccgccaagtccatcgcgctgatcgcagtgaatgacggcgattactgggattacattccctccggcacggggaaggggaagccggtttccaacaggcccctgccgatcgttgccattaccaccaccgccggcaccggatcggaggcggacgcgggcactgtcatcacgaacgagaaaacgcatgaaaagacgggctttgtccatccggacctgtttccggcgctttccatcgtggacccggagctgatgcttaccgttcctccgctgtttacggccttccagggctttgacgccctgttccacagcgtggagggctacgtttccaacggcacgaacctgatgagcgacatgtacgccctggaggccattaagcatatcagccgctacctgcccagggcggtggccgacggctccgacctgaaggcccgtacccatgtggccttcggcaataccctgtccggctacgtgatgtgcgtgggccgctgcaccagcgagcattccctggagcatgccttgtccgcctaccatcaggagctgccccacggggccggcctcatcatgatcagcaaggcgtattttacgcacctgattgaacggcatgtggcggatgaacgctttgtccgcatggcgcaggccatgggaatgccggaggcggcggaccccatggatttcatcaccatgctggacaggctgcaacgggattgcggcgtaagcggcctgcgcatgagcgattacggcattgcgccggaggagttcgggaaaatggctcacaatgcgcgggaaaccatggggttcctgttccagtgcgaccgcgcggagctgtccgtggaggattgcgtttccatttaccggaagtcttatctgtaagccggggagcctgtaccatgagcaagaagattttaatcatttcctccagtccgcgcaagggcggcaattccgacctcctgtgcgatgagttcatgaagggggcgcggggcgcagggcatgacgtggagaaggtgcgcctggcggagaagcgcatcggctattgccgcggctgcggcgtgtgccatgacacccacgcctgcctccagaaggacgatatggaagagttgctggacaagctgctggaagcggatgtcatcgtgctggccactcccgtgtatttttatacgctgtgcggccagatgaagacgtttatcgaccgcacggtcccccgttatctggacatccgtgacaaggagttttacttcattctggccgcggcggaggataaccgggccaatatggagcgcaccgtggagtgcttccgcggttttctggactgcctggaaggggcggtggagaaaggcgtggtttacggcaccggggcctggaagatgggcggcatcaagggcaatccggccatgaagcaggccagaatcatggggataggggtttgagcctttttccccactaaagaagatcagccgtaaaaccgcccatggaataatatcaaccggatttcatatagaatgttttttgcgcccagcgaggataggtgagacagcttcccgcggcgtccgatttcccgggtggggatgagggcgccgcgggaagaaaagctccggcaatgtttccggcttttcttctgcccgtggtgcgccttccgttgccggagaaggccggcagccgttttttccttcttcgcggggattcccggtcccgttcaatcctgccgggcagccattcctattaaaatatagacgatgaaaaaattattaccatatttgtacgcggcaggggctttccttgccccctgttgcgccgcggagccggagattccccagccatccccgaacaccatgaatattacgattaaagcaggagaaaaggaaattgccgccactcttcaagacaatgccgccgccagggatttcgtggcccggcttcccctgacgctgacgctggaggattacggcgataccgagaagatcagccctctgcccggcaagttgtccaccgccgggtctccggccatggggaaacccttccggggggccatcgcctattacgccccgtggggcaatttgtgcattttcaggaaggccttcgagccgtcccgcggcttggtgattctggggagcgtggacggggaagggatgaaggcgctggatgtttccggaaagatccgcgtgaccattgacgtgaaacgctgaccttccggtttgtccggcaggtttttatcccggttttccgggatggggcagcgttccttttttaaggaatcgggagaaggctgtttttcccgggcgggggcctgttgcctcatttttttgggagaaaagatattaaagatacatgagatttttttaatgatatgaaaataaaatatttattgaatgcgtgcgctgcggtgcccggtgatgggaaaggaggggcggatgcctcccgttgacaggatgggccccgtcagcacgcgggagcgttccgtgattctggacgccttgaggggactggcgcttttcggcatctgcctggcgaattttccggagttttccctgtacacgttccagagtccggaggttgtttccgccatgcccaccgccggaatcgaccgggtggtccgcttcctccagtacgtgtttattgacggcaagttttacagcctgttttccctgttgttcggcatcggcttttccatcatgatgtcgcattccatggagaaggggcgcgacggcatcgccgttttttaccgcaggatgggccttctggccctgatcgggctgctgcacctgatgctcctgtggagcggggacatcctgcttctgtatgcgctggccggcctgctgctgccgctgttccggaatgtgccggacagaaagctgctggcgattgccgccgcgcttgttttctgccctgttctcatggatgccctgaaggttttttcaggctaccggtttgacctcgccgctccggtggggggcgcagtacggtatttcaacggcctcagcgggattacggacgcgaatttcggcagatggctggtggacggggaacattattccgacgttctgaagttcaccctgtccggggcgttcatccgcgtccaggagctgctggagagcaaccgcgtcttcaaggtgctgggcttgttcctgctggggctgtatgtgggaaggaacggaatttatgcgaatctggagaggcggcggacgctgttgaagagggtatgccgctgcggttttctggcggggctgcccctttccttcctgtacgccgcccatgcgcttcacctgctgggcggcgtacccgtggccgtggccttcctgtatgccgtcagcgttattcccctcagcctggcgtatgtgtccgttttctgcctgtggttccttcgccggaaggacgctcccttgttccgggcgctggcggctcccgggcggatggcgctgaccaattacatcgggcagtccgtgctgggcatcgtcctgttttacggaataggcttccgcctgggggcccggctggggctggcgcaggtggaactggtagctgcctccgtcttcctgttccaggcgctgttcagccgcgtctggctgaagttctgcctgttcggccccctggaatggggctggcgcatgctgacgtacgggaaaaggctccggttgttccggaagactccggttttccccggaaggaaggcggctccttttaacaagtaaagagttcatggaggttttccaatggctgtttatccaatcacggagccgccgggccggctgggagtcatcaccgcgtatctgatgatttacgtggtgtgggggtccacctattattttatcgggacggcgctgcaggggttccctccgtttctgctgggcggaatgcgcttctgcacggcggggctccttctgctgctggccgggcgggcaaggggggaggatattttccggggtcccctggtccggaagtccgccgtcagcggcattatcctccttttcgtggatatggccgtcgtcatgctggcccagcagtatttgagcagcagcctggtggcgatcatcgcatcgtccacggccatctggattatcgcgctggatgttcccatgtggcgcaggaatttccggagcatttccgttttcgcggggatagcggccggattcctgggagtgggccttttgttcgcggagcaacttggacgggaggaagggggggccagggcgcgcacggtatcctgctgctggttttcggctgcgtttcctgggctttggggacgctgtacgccaagtaccgttcctgcgcggaggaggcggtcaacaatgtgggcggggcggcgtggcagatgctcgcggcgggggtgatgttctggtgctgggccctcgtccggaaggagccggagaacatggattgggaggaagttcctgcttccgcgtggctgtcactcctttatctggtgctgttcggctccgtcctggcgtacaccagctatatctggttgctgaaggttcgtccggcggcggaagtaggcacgcacgcctatgtgaaccccctggtggccgtcgtcctggggtgtgcggcgggaggggaagggatgacgtgggcgcggatggccgggctgttcgtcatcctggggagcatcgcgctggtgaggagaacgcctccggaagattccgccgggaaagggcgcgcgctttcccctgcggccgccatggcgtacagaaagggaatatcgtgccgggaatctgaaaaatgaagtttttttcatgatttcacggttcatgaaatgatttttatgacagttaatatttattaattatgaatacattacaaatgatgaacgagaaaatgctaaaaatcctttgcattacagttactataaggaatagcctgaaggaagaaagaagaaggccgggaatgcggagaatgccgctccccgtctttttcccggtcttccttttccggatgccgattgccgccgcttaaacgcatatgatgaattccaaaagaacattttaccaacccatcaccatgaccaagaaaatgattaagaatacttcctacgagggggagcgccccttgtttgcctcccatcatctgaggctggaagacgtcacgatttatccgggagagtccgccctgaaggaatgctccgacattgaagccgtacggtgcgagttccggggaaagtaccctttctggcacaacgacggcttgctgattgagaattgcctgttcagggaaggcgcccgagccgccatctggtattcccggaacctgcgcatgaaggatacgcgggtggaagcccccaagatgttccgggacatggacgggatggttctggagaacgtggtcctgacggacgccctggaatgctgctggcactgccggaacgcggagctgcgcaacgtgcaggcggacaagggcgattacctgttcatgcacggggagaatatggacattgacggtttccgcctgaacgggaactactccttccagtattgcaggaatgtggtgatccggaatgcggagattcattccaaggacgccttctggaatacggagggcgtgacggtgtacgattccgtggtggacggggaatacctgggctggcattccagaaacctccgcctggtgaattgccgtatttccggcacgcaggcgttgtgctacgcggagaacctggtgctggaaaactgcacgttcggggaggatgcggacctttgttttgaatattcctccgtgcaggcggaaatcaaggggcgcgtgcacagcgtcaagaacccgcgcagcggacgcatcgtggcggaagagtacggggaggttattctggacgagcactgcaaggctccggccaactgctccattgaaacgggaaaaacgcagtcgggagaagcagcatgaagtacgattttgacacccttgtgccgcgccggggaacgaattcctacaagtgggattccatgccccgggcggacattctgcccatgtgggtggcggacatggatttccgcacggctccggcggtgacggaggccatccggaagagggcggaacacggcattttcggctacacgcgggttccggattcctattatgaggcggtcacgaactggtttgaacgccgccacggctggaagatcagtccggagtggattatttacaccacgggggtggtgcccgcgctgtccgccatcatccgggccctgacggctccgggggacaaggtgctggtgcagacgcccgtgtacaattgctttttttcctccatccacaataacgggtgcgtggcggaaaccagcccgctgaagtacgagaacgggaagtacgcgcttgacgcggaggacctggagcggaaggcggcggatcccgccgtcaagctcctgctcctgtgcaatccccacaatcccgccgggcgcgtctggacgaggccggagctggagaagatcgcggatatctgccggagaaacggcgtgctggtggtggctgacgagattcattgcgaactgacgtatcccggccatccctacacgccgttcgcctccctttcggaggaggccctgcgccattccgtcacctgcatttcccccagcaaggcctttaatctggcgggcattcagatcgccaatatcgtcgcggcggatgaggaggtccggaggaagattgacaaggctatcaacatcaacgaggtgtgcgatgtcaattccttcgccgtggatgctctggaagcggcctacaacggcggagaggactggctggaggagctgaagctttacctttacgggaattacgagacggtccgggacatgctgggcgaacgcctaccgcaactccgcgtgctgccgctggagggaacgtacctggtctggatagattgctccgcgctggggctttcctccgcggaaattgtccgtttgctggaggaagaaggccgggtgatggtgaacggcggcgaaatgtacggggaatcggagggctgtttcatccgcctgaacatcgcctgtccccggaaactgctgcttgagggggtggaaagaatctgccgtacgctgggcggccgcgtttccggaacatgaacgcggccggcggcctgaaaggtctcaatggagagagcgcgaagaacgatcatcaagaacaaacaatcaagttgccatgagaaacaatatgacgagaagagcgtggctccagtcttccaccgcggccctagcgtgcctggccttgccggaatatgcgctgggcgcggccgcggagaagaacggagcttccagggtatggatgacgaaggagatttctccggaggctctcgtaagaatttacgaggccctggggcgtccggccacgggaaaggcggccgtcaagatcagcaccggggagccgggcggccgcaatttcctgagtccggccctgatcaagggcctggtgcaccgcgtgaacggcaccatcgtagagtgcaatacggcttacggcggcaagcggtcccggacggaagaccacctacgtgccgcgaaggagcacggtttttccgacattgccagggtggacatcatggacgcggagggagagttcaccattccggtgaaggacaggaagcacctggaatacgatatcgtagggaaccatttgaagaattatgatttcatgatcaacctggcccacttcaaggggcacgccatgggcggcttcggcggcgtgatcaagaaccagtccatcggcgtggcttccgcaagcggcaaggcgtacatccattccgccggaaaaacgcgggacgttgccgccgtgtggaacaatctggccgcgcaggacgactttctggagtccatggccgcctccgctcaggcggtggccgattacttcggggacaggattctgtatatcaacgtgatgaacaagctgtccattgactgcgattgcgatgcccacccccatgacccggagatgaagggcatcggcattctggcttcccttgacccggtggcgctggaccaagcctgcctggacctcgtttacgccgtcaagccttccgccggagacaacagcaaacccctgatcgagcgcattgaaagccgtcatgggcggcacacggtggattacgccgaacagataggcctgggtaccaggaagtatgagctgaaggagctggaaccgcaggagggcgtttaacggagtattttcctttcaatatcaaaaataataaaaaacagaaacagttatggaagaagttacattaaacaacggagttgtcatgcctatcctgggctttggagtttttcagattcccgacgccgcagagtgcgagcgctgcgtgctggacgcgatcggcgccggctaccgttccattgatacggcccagatttacagcaatgaggaggccgtaggccgcgcggcggagaagagcggggtgccgcgcgaggaattgttcctcaccacgaaggtgtggattaccaacggcgggtatgaaaaggcgaaggcttccattgacgagtccttgcgcaaactgcgcacggattacgtggacctgctgctcatccaccagcccttcaacgattattacggcacttaccgggccatggaagaggctaaccgggccggaaaggtccgtgccatcggcgtgagcaatttttatccggaccgttttgtggacctggcggagttctgcgagatcaagcccgccgtcaaccaggtggaaacgcacgtgttcaaccagcaggtgaaggcccgggagctgatggcgaagtacggtaccaggatggaatcctgggggcccttcgcggaaggccgcaatggatttttcacgaatccggtgctgaaggacatcggagagaagtacggcaagactccggcgcagacggccctgcgcttcctgatccagcgcggcgtcatcgtcattccgaagacgacccaccgggaaaggatggaggagaatttcaacgtctttgactttgaactttcccaggaggacatgggggccatcgccaggctggaccgcggagagagccttttcctgtgccatcaggacccggagtcagtcctgtacctgatcaattacgtaaagtaataattcacctcaagtattggaaagatgacagggcattcatttaaaaggttttgcgcggctttctccgcctgcatttgctgtgcagggagcttatccgctgaaaacaataacgccaacacggacaggatcatgaacgaacaactgaatttaacgcaggaatgggacaaggtgtttccgaagagcgacaaggtagaccaccgcaaggtaagcttccgcaaccgctacggcattacgctggccgcggatttgtatatcccccggaaggccggcggaaagttgccggctatcgccgtttccggccccttcggagccgtgaaggaacaatcttccgggctctatgcccagacgatggccgagcgcggttttctaacgatcgcgtttgatccctcgtatacgggagagagcggcggggaaccccgttatgtcgcttccccggacatcaatacggaggatttctccgcagccgtcgactacctctccacacgcgacgacgtggaccccgaacgcatcggaatcatcggcatttgcgggtggggcggcatggcggtgaacgcggcggctatcgacacccgcatcaaggcgacggtagcgtccacgatgtacgatatgagccgcgtgaacgcgaacggctatttcgacgcgatggacgccgacgcccgttatgagcttcgcaagcaactgaatgcccagcgcaccgccgatgcgaagaacggttcttatgcgctcgcggggggcgtgcccgatcccctgcctgacgatgccccaggattcgtgaaggattactacaattactataagacgccccgcggctaccacaagcgttcgctcaactcgaatggcggatggaataccacctccgcgctctcgttcatcaatatgcccctcctggcgtacagcggtgaaatccgcagcgccgtgctcatgattcacggagaaaaagcccattcacgctatttcagcgaggatgccttcaagaagttgaaaggggacaacaaggagctgatgatcattcccggcgcgagccatgtggatctctatgacaatcaagccggggttattcctttcggcaaaatcgagcagttctttcaggagcatctgaaataaggaggttctgcggctgattttgaagggagctgattacggtgagggactcaacatgataagccgtctgccggttgttcgcaggggaaggacagcgttcttcccgttccggcggggttcaagccattttaagcaagagacacatgatactgattttcggagcattgctggcggtttacgttttctgccgcgccattctgccgcttaggctgaaatggggctggaaggccctgctcgccgtccttctggcggtggcggcgttcaaattccatctgctgcatttgttcggcggccccatgtttttctccccggttctgccggaaggcgtcctgctggcggccgcatggctgttctccgtgcttttcttgttctttttcctgctgctggcggcggacgtggcgcgcctcctgtatttgctggttctgttctgcctgcggaagaagaagacggaacggttccgcatcatcggcaaccgggtgaatcttgccctgctggctttcgccgccgtactggctaccgtggggatggccggaggaaccggggtgccgcgggtgaaggaggaaacgatttccgtgaaccatctgccggatggggcggacggcctgacagtcgccgtgctggcggaccttcatgtggacggcatcacgcgggcggaccgcatcaggaaaattgtggaacgcacgaatgccctgaatccggacatcgtcattattgccggggacttcgtggacgggacggttcccgtgcacggggatgatttgaggccgcttgcggatttgaaggccaggtacggggtgtttggcgtgccgggcaatcatgagtattattccggttatgaggagtggatggagttcctgcccaccctgggcatccgtatgcttcacaatgaacatgtgcagacgggcgggggcgcggtagtgctggcgggggtgacggatcctgtagccggcatcatgggaaaggaggtgccggatatacgcaaggcgctggcgggagccccggaaaagggggtgcgcatcctcgccgcccatcagccgcggctggccccggaagcggcggagcacggcgtggacctccaggtttccggccatacgcacggcggcatgattgccggcattgaccggctggtggcccggttcaacgagggctttgtgtccggattgtacacggtggggggtatgaagctgtatgtctccaacggggcggggatttggaacggctttcccatccgcatcggcgttccttcggaaatcgtgctgatccggctccggaaagaggaataagagtgtttagagtggagtgggtgcaatctttggaacagatgagggaaaacatgttgacttatagctgctctaacgtttagacaggaagaaggaacaagggtcgtgcacggagactgccggatgaagccgtttttcttcccgggctgttttctgcgcggccttccaacccagacattaaattcatgaaaacaatatcaatgatatgcacgctggcggccgccctgatgacgggggccggatgctcgggacaggaacagcccaaggtttccgtggaacctgccaaggtgctcgtcgcctactattcatggggcggcaatacgaagtacgccgccgcgcagattcagaaggcgacgggcggaaccctgtttgaaatcaagccggtcaagccttacccgtccgggtaccgggaatgtacggtacaggccaaaaaggagattcaggaaggcgtcaggccggagctggccgccagggtggaggacatgggcaagtacgacgtgattttcatcggcagtcccaactggtggagcacgattgcgcctccggtcgcctctttcctggcaagccacgacctttccggcaagacggtgattccgtttgtgacgcacggaggcggcggcatggcgcgctgcggggacgaggtgcggaagctgtgccccaagtccaccgttctcaagggcggagcttttgccggggaaggcatccggacggccaggcccgcgctggtcaagtgggtcaatgacacgatcaccatcaacaaataatgctccttatgaaacgaacccttgcgggaatggctttttcccttgcctgtttgatgaacctttcagaagcccaaaccatgaataacgatacaagcgccttgtcgccaaaagaacaacagattgccgccatcagcgcccatacggccaggggcgacatgcccggcctgcggaacgccctgacggcggggctggatgccggactgaccctgaacgagctcaaggaggtgctggtccagatgtatgcctattgcggttttccacgcagcctgaacgctctcaatgagttgatggttctggcgaaggaccgcgcctcgcgcggcatcaatgatacggtgggagcggaggcgggagcgccgcccgccggaaagagcatcgacttcggcacggccaaccagacgaagctttgcggcgctccggtgaagggggatcttttcctgttcgccccggccattgacgagttcctgaaggcgcatttgttcggggacattttcggccgcgacaatatggactggaagacccgggagctcgccaccatcgcggccctggccgccatgacgggcacggaaagccagttgaactcccacatccgcatcgggaagcacaacggcctgactgacgggcaggtggaggccattctggccgtatccgccgctgccgggaagaaggacgccttccccaaaggggagccggctccggccaatttcaccggaaaagcctgggtagccatgctggtggacaacagggattacgacatgtccgcctataacgtcacctttgcccccggcacgcggaacaactggcacagccattccgtgggccaggtgctgttctgtacggaaggcacgggatactaccaggagcgcggcaaggccgcccggcgcctgacgcccggttccgtggtggaaatcccggccaatacggagcactggcacggcgcggcgccggacagtgagttcgtgcacctcggcatcacgcccagggcggcttccaacaggacggcgtggggaggccccgtgaccgatgcggagtatgcggaggcgacgggaagcaaataaaagcgcagggattttccggcgtttcctccttttccttcggagaggggggaagccgggaaggtttttctccttgacgggaaatgaaggaaaaaacggggcgtccgggaattccactggaattcccggacgcctcctgttgcggatttaagggaaagcttattcttccggagcgatgttcggttcgctggcgctgacgtggttcagcggattgcagctgtccggcctgtggttgttcaaaagatcctggtagaatttcttcttgtacttcaagacttccatctgttttttcaggatgcgaagctgttcacggaggcttttctcctgcttgaaaatcagttcggcgcgttccggaatggtggtgtccccttcctggcacaggtcgatgtagtgcttgacgccttcaatcgggaggcccgtcatccggaggcagtgaaccaagcgcagccagcccagggtgtagtctgaaaacatgcgggcattgcctccgctgcggtccacgtccggaatcaatccggcgttttcatagtagcggatggtgtaggcggacatctccatcatttccgcaacctgtttcacggtatatttgggagtgcggtcataggaaggccggtaggagctggatggggtcttttgtgtgatcattgtgcagttgatggcttacagttactctaatatactaccggttgcgggatggcaagcgttttgcgttgcctcgcgggcaataacgtgttcataaggcagggaaaacggctgggaccgccttccggcggacggaagggttttctgactgactaattgccggatgaaggaaaaggggaaaggccggaaagccgtctccatggttgctcctggagaagacgccggaacatgaaaaaggctgttccggtgaaggaacagccttgattcattggaagaaagcacatttcaggcgcgtaccctgcggcggcgcagcatcatggcggcaagccccagcaggcccagggaggccgcggccggttcggggacggccagcgtcccttccagggaaaggtcttccacggtggcgttatctcctccccggcctccggagcttcccaccacggcatagaccttgccgttgccgttttccttcatggctctcaactggtcttccgtgaggtcatagtgaacgttccagggggagccgtcattgttcctcgttcccttgcagagttccaccatttccccgtccctggtttcataccagacggaatacgtgtacgttccggtggttccggacggggtgaggttcatgctgaagctcaggccggagtaatcctgaatgttttcaatggtcattttcagaccgaagcagacgcccgccgtgccgggcatgctgggcaggttgatggtctggtcttccgtgttggaggtggcgttcccccagcgcatgtcgccgttgccggtagtggtgtaccatccgtcagcccgggaaccgagccagtttttaacgtcgtctcccgtgatgccgtccccggcaaggcgtcccgctgagttgtagccctggcccgtcatggcgccgatgtcgggcatcagctcgacggttgccgccgcagcgacgcctgccagagaggccacggccaggtggatgatgaggtataatgctttcttcatattcgtgtggaatgattgaattattcgcaaactaccggattaacaatccgcggagctccggagacgtttcaaacgggaacgaaggaaagctcaaatgcatggttaacaaacactttcccgttttcttccaagcccgcatactgcctgggaattgggaactcccggccctaatggatactctcgccggagcaggatggcggctattgaaggagaacctccgctgcgctgcggaaagattttttacccacgaaaggcgggagccttccgttcccaggcgcgggaggtgcaaatccaccgtttcttttgcaggttgcctttcgcctggaaaggacgggagcctgctcctcatctcatggctgtttcctttcccagacgcgtctttcccggaagttcgggcttccctgcttcgttgcggaacgaagagaaaatctattgcatcaggaacagaagctgacgatttacggagtatggacaagggaaatttcccgaaaacgtttttctttcagatgttcatgcttgactccggattgttaatccgatgcatggtcttctctatgttttaggtaattgaaacagaatatattatggagacgttaagaaggtgttttcctgcgctggtgatgcttgtagttggcagccgcgggggaggaatacctcaataaagggaggcggatggagccagtgcctccccgtccgtttcctgaaactccggtttcacggctttccttccgccggacgggggcccggtcaggaattgtccggagcgggaagtgggggccggcgtgcgccgtgtcccggcaagtccgggaattcccatggaaaagggtcaaagggtttgacgggcttttccggcccgttacaatgagaccgctccgggatggagcctgcgccatgattattgcctccctttccgattccgcccgttacgagtctttgaatccccttttccagcgggctttcgattttgtcagggaggccggtccggcttccctggaaccgggcccccatgtcctggaggaagacgccctgattgtgatggtgaatgagccggcgatgaagaagccggagaaggcccgcatggaagtgcacgacaggttcattgacatccacgttcccctttcacgggaggaagggtttgcgtggaaggaccgctctgccctggaaaagccttccgaaccgttcaacatggaaaaggacgcgcagcattacgacgatgcgccggacacctcttttaccgtgaagccggggcagttcgccgtctttttcccggaggacgcccatgccggctgcatcggggaaggggctctccgtaaactggtgattaaagtcagaacggcctgacccgccttccggaaagatggtccggcgccggaacaggccgttcctccacgcccgctccggcttgcctgccggcggggcaatcattcaatttattcctcgtcttccaccctcgcgtcctgcttggggtcctgcggagcattttccggaatccagacggccacgttgccgccgtggacgaggaactggccgttgccttcctcgtcaatggtgacggtttcctccacgtttccggtggcttccttccaggtttccccggcgtgctgcttgcccacgttcatcaccttgtctccgtcctccccgttggagatgagcacggccacgccggaatgcgggtggtcgtcatcccccacgcgggtgaagccgatggtgttcgggtggtcaaagtagtagttctgctccccgaaggcatggtttttacggatttccagcaggttgtcgatgatgccgcggtgcatgggcgggttgccgcttactccgtagtagtccccgtagaagatgcagggatagccttccttcatgagcaggatgagcgcataggcggagggcttgaaccagtcttccacggctgattccagggagctgccccactgggagtcatggttgtccacaaaggtgacggccagcgtggggtggttctggaccagggtgccgtccagaatcttggaaaggtcgtaatcacggccctgcttggaagcctggtacatgttgtagtgcaggggcacgtcaaacaggtccaccttgtagcgttcctccttgaggtattcgttcagggagtccaggtcctgcttccagtattcgcccacggcgtagaaatcctctcccctgtccttgcggacggcggccaggaatttcttgatgaactcgtcattgatgtgcttgatggcgtccagcctcatgccgtccaggtccagttcccgggatacccatacgccccatttttccatttctttcaccacttccgggtggtcgaagtccaggttggcgaacatgaggtagtcatagttgccgttttcttcatccacgccttcgctccagcttttcccgtcccccatgatcttgaagatggaagttttttccgtagcggcgtcgtagtccgtgccggtgaagtggtaccagtgccatttgaagtcggagtacttgtctccgcggccggggaagttgaagccggtccagccttcgatttcgtaggcgtccgtgatttccttgtcccggttctgctggtccacttccttggccatgaatttttccgtatagtccgctccggccttgtggttcatgacggcgtccaggtagacgcccacatggtgttcatgaagggccttgatggcgtcctggagttcctgcttggtgccgtatttggtgcggaccgtgttcttctggtcgaattcccccaggtcaaacaggtcgtaggtgccgtagcccacgtcgttctgttccttgcccttgtaggccggcggaatccagacggctgtaacgcctatttcctccagatgggtggcgtcttccttcagcttgttccagaactgcccgtcgttgggcaggttccactcaaaatattgcatcatgattccgtttttcattttgtcagattccttgtaaatgtcgttcgggttgttccgccttcaggaggccggctgatggggaagacggttccctggcgtctgccgggcggggctccggatgatgatttcacacgaagccgtcaacaaaatagagtccttaaagcgcggcgcgttcggcatactgccggtgttatgtcccgcaaaatgtcagggagaacgtgtggaaagctggaaaagagggctttccgccagggccggactgaacctgcccgcgagccgtcaggagtgaaactggcccttgttgctgctggaaaaacgagcgtcagcgaacgagtgtggaaagagagggcgcggcctttgtccgcctgttcattccgaagccgcaggggcctgcggcgctccctggaagggtttcacgcttcggccgtgctgtggtccaggtagtgcctgtttttcagccggtagtatttgaggaacctccggatgaagagcagggtgacgatgaaggagagcacgtccgccagcgggagggaggcccagacgccgtcctgtccccagaacctgggcagcaccagcaggaacggcagcaggaagagcatctggcgcgtcagggagaggaagatggccagacgggccttcccgatggcctggaagaagttgccgatgatgatctggctgccgatgagcgggaaggccagcacgcagatggtgaggccgttggccgccaggctgatgagcgcggcgtcatccgtgaagagcccggcaatgccgcgggggaagaaaacgcaggccaggaagcccagcgtggtgaaggaagtgcccgccagcacgccgtacttgagggtgagcaggacgcgtcccggcttcatggccccgtggttgtagccgatgatgggctgcatgccctgcgtgaggccgatgacgagcatggcgaacaggatgagaatgcggttgatgatgccgtaagcgccgatagccaggtcccccccgtggtccgcaagctgcctgttgatggcgatggtgaccgcgctgccgcagacgtttaccaggcacggagccatgccgatggacaggatgccggtgacgatggccttccgcagttcccagatgccgcgccggaagtggaccgtgctggccgcgtcggagaagtggagcagcacgcgcgccatgccggtgacctgggcaagcagggtggccagggcggctccggtgatgccccatttgaaccagaagatgaagatgggagccaggatgatgttgatccccacggagagcagggtggagcccatggcctttttcgggtagccggtggccctcatcacgtggttgaggttgaaaaagacgtacgtgacgggcagccccagcagggtgacgagcatgaagtcgtacgcgtaggcgagggtttgcccgctggcgccgaaggcggtcaggatttccgtcaggaagagcagtgtgggaaccaccagcaccacggcggcgatcaggctcatgatgaggacgttccccagcgtgcgctccgtcccctcctggtccttcttgcccagacggatggagctgatggccgccccgccgatgcccaccagcgtgcccagcgcaaaggtcaggttcatgatggggaaggtgacggccaggccggacagggccagggggcccacgccgtggccgatgaagacgctgtcaatgatgttgtacagggagtacaccaccatgccggcgatggagggcagggagtactggaccagcagacgccatacggatgcgttttccaattctgcgatgttgcgtgactgggctgccatggacggacctccttttcagacgggaggcaaactataggaatgcgcggaggggttgtcaagctgtccacccgtccggggagcgggcatttttccgccggagcggccggaaaggcctgtttttgattgactggggaagcttttgggggttgattcctttccgcctttttccaggaacacgccatgactttttccgtttgccctttcctgcgccttgccgccgtctgcggaggcgcccttctgtgctcttcctgcctgcccatgctcggcaccgggcagatgctggcgggcagccatcttgcggacggcctgctgtccacctcccccctggacctggtgtggaggggggacatccggtcctttccctcctccgggctggatacgcccaggggcttcaaggtttcccccgcggattcctattccctgctgatggaggcgcgccccggcattgccggagagtgggcctgctaccatgaccggaacagttactactgggcctttgtggccgggaagaaggaggaggaagcggggctttacgccgtgcgccgcggcgtggccgtgaacggaaccaccggggagattgaagaccaccccgccgcgcaggccgtcaagcctccctccgtcatgtaggcgcgggttctggtctttttgcaaaaaccgctgccgggaacccgttttccgggctgtggaacacgatagatttgacaggcaggggcctttgcgggcgtattattacccgcatgaagttccttttattatcgtttgcgtggatgtgcatggcgtgcgccggggcgtggggacaggatacggctccctccttcccggcgaacggagccaattacaggctgttcccggcggaccagccgcccctggttcccaagccccagcagctgcactggaccggcaaggccattcgcgtgcagtccgttcgcatcctggccccgtctccgtccaggacttcctatccggaacagatgaagttcatcgtttccgaattgaagtcctttctggcggaccaccgggtgaaggtggctccggacggggcgttcgccgtcaagttcgtgaagggggaggtgaaggccggcacggagaatcccaagctgaaggaggaggcctattcactccgcgtgactcccggcggcgcgctgattacggcagcggacaccagggggttttattacggcatgaagacgctggagcagcttctcctgcggcgcggcgggacgacgaccatcgccgcctgcgacatcgtggactggccggattttgaaatccgcgggttcatgaacgacgtgggccgcaattacatgccgctccccctgatcgcgcaggagctggattccatggcgcaacttaagctgaacgtgtaccacttccatttcacggagcatcccggctggcggctggagtccaagatttatccggaactgaatgatcccaagaatttcacccgcatgccgggcaaattctatacgcagaaggagttcaagcaattggtggagtactgccgcctgcgcaacatcctgctgattccggagatggacatgccggggcacagccaggcgttccggaaggcgctcaacgtgaagatgagcgatgaaaaggccacgaaggccctggtggccctgatcaaggagatgtgcgccctggttcccaaggagaagatgcccatcatccacatcggcacggacgaggcccacggcaaggacgagcaggtgaacaatgacattctgaaggaatacatcaatgcggtggagtcctgcggccgcacgcccatgaggtggcaccccggcctgacgcctaagggctataacggctccatcctgcaattgtggtccggccgccagaaccgtggcgcatggcctgtcaacgggtccaagtacgtggattccctggagacctacctgaaccacctcgatccgtttgaaacggccatgaccatgtacttccgccgggcctgcccgttccagaatgcggacggcctgggcatgatgctgtgctctttcccggacctggaaattacggacccgcgcaaccaggttctccagacgcccgtttacgcagggatggcgttcgtttccgagcccttgtggaacaatccccatgaaaaggtgcagggagaccccaaccaggacgagtacatgaagtatttctccaacctgcccgtgcagggggacccgctgctgaaaggatttgcggagtatgaaaaccgcgtgctcgccatccgggaccgcttcttcgtgaacaaggagttcaattacgtgcggcaggccaatattccgtggaagctgctgggccccattcccaacggagggaagacggaaacggagttcgccccggaggcggacaacaagaccgggaagatgaaggattcctacgagattgacggcgttacctacgagtggtccaaggacgcctacaccggagccaccatcatcttcaagcattactgcgatttcccgacgctgttcaacggggcgaagatgggggcctatccccacaagaaccacacctattacgcgcagacctggatttattccccgaaggcgcagacggtgcccttctggatcagcggccatacctgggccacgtccgactggcgcaacggcccggcgagcgtccccggcaagtggttccacgcgaatcccaggttcttcgtgaacgggcaggagattgaccccccgcaatggaagaagccgcgcaacggcggcgtgctggtggatgaaaactaccatttccgggagccttccatggttcccctgaagaagggctggaaccgcgtgctggtgaagagccccagcaacaattccgcgcgccggtggatgttcacgttcgttcccgtgcaggtgaaccccaagacgcccggctgcaacgtgaaggagtatcccggcctcaagttcgccgcggaaccgaagtaaagggcttttccggttgttcccgggcaaatgacgaaggcatgaagcgcgttccgcttcatgccttctttgtgtccggacgaagttccgggagagcgcggcgtcctgtcagagttttttccagggcagggcttccagcatcccgtcaaagcccagtcccgttccggcgggaacggctacctgcgggttcatgccgcccatctggtcaaggaaggggtccggttcaaacaggaggtgtgtgcaaaggccgcagagggggatttccgtgggcagggcgttgcggtagtagtccgccgcctggtagacggcccagagctgccccacgggatggtccatgacggtggtgaacacggggggctcgtaaagatactccggcgtagcttccctcgcgggcttgacgatgcggatgatgggcaggtccgaggagatggccggctggtgctccgagtccgagcccatgtccagggccagcggcatgccggcgtccaccagccgttcccagctctggacagagaaggggcacgggtcttcaatgaaatctatccgggttttcaggtggtggggcagggatttccagaatttcagggcgtcgttttcattcaggcagccgttgaagtccagccgccagcgccaggcggggaccatggaggcgagcatggtcagccgttccagggcggcggccaggttggggctggccttgatttttccggccttgaaccccttggattccatgatgcggatggtggcggggctgacgcaggagggcagcgtggcgtggctggccggaatgtgcaggccgtcaaacaggctggcgcccttcgcgcgcgcctccccgtccgtccgggcgcattccaaggcgcggatgcccagcggcagcgggcttcccttcctgagcgcgtccagttcctcctgcaacgtggcgtcccccagctccggccacggctggatgcagccgtacccgccttcatccgttttaatgagggctcctttcctgcatacttccgcggctctggcgttcagcggaccgcaggccgttaaagaatattcatggtaaaacacaactttaattcaaacagcctttcaatcttttgtcacgatgaaaaaaggttttcattggattttggagggggaatggctaagctccgtgtcatgtacagaacattggtgttcggagcgggcggccgtgtggggagccgcctggcggcgcatctggaagaggaaggcatggaagtggtgggatgcggacgggacgcctgtgatttaaaggatttaaaagccctgaaaaacgtgctgctttcctccggcgccacccacgtggtgaactgcgccgccgtgagcggcctggaggcctgcctggatgatccggagacggcgcaccgcgtgaacgccatggccccggagatgatggctcgcatctgccgcctggagggcatgcgcttcatccacctgagcacggactacgtgctggacggcaggagggccggcctgaaaacggagtcggacaagtgccgccccgtgaacgtgtacggagaatccaagctggaggcggaactccgcgtgcgggaggaaatgccggaggcgctggttgcccgcgtttcctgggtgttcggcaatccggaacggccctccttcccggagatggtgctgcggaaggcgctgaacggagaacccctctccgccgtggcggacaaatggtccatgcccgcgtgggtggaggatttgtgcgggtggctccgtttcctggcctatgaaagcgacgcgtccggcgcgctgcacctgtgccagtccggggaacccgtctcctggcacggatatgccgtgaccgctctgaaatgcgccgtgaagcacgggctgctgccttctttgccgcccgtggcggaacaaaagctcgacgaacaggccggtttcagggatgctcggccccggcataccgccatgtcctgcgaacggctcgcttccctgatgaagcggcccgtgaggacgtatgaagaggccatcgacctggccgtggcccgctatgcctcagatccaaccttcctctcccgcatttcatgaacgatttccgcaattcccgtgattctagcgattcccgccccaggcccgcctaccgggaccgccgctcccagccggggcgcccgcgcacggctcccaaaaagaacctttttgtcaacaagtccccggagggcagtgaacaatggctcacgccgtgggtggagctgaaatacttcacgtacaatcccgccgttttcccccgcatgctcggctccgtgagcggggaaatagccccgggaagcctggtgcacgtctatgacaagaacggggaactgttcggcgcgggcttctggaacgaggccagccgcacgcccctgcgcgtggtgtaccacgggaaggacgcctttaccgagcgggacctggacgccgccctggaacgcgccgtgaagctgcgccgggagattctgtgcctggatgaaaccaccaacgcttaccgcgtgctgcacggtgactccgacggcctgggcggcctggtggtggaccgttacgcggacgtgctgagcctggaggtgagcacgctggccgtctggcagaggctggaccgctggctgcccctgctgcaccgcctgtgcggcacgaagcgccacgtggtgcaggtggacgaaggcattgcccgcatggagggcatccgcgcggaggacgccccggaatcccccgctccggtccggctggtgaagattgtggaaaacggcatcacttatgaagtggacttcgcccaggggcacaagacgggcttcttctgcgaccagcgggacaaccgccttaaattcgcctccctggtgaagggggccgcggtgctggacctgtgctgctacagcggcggcttttccattgccgccaaaatgctgggaggagcggcggaagtcacgggcgtggacctggatgaaaaggccatcgccatggcgaagaggaacggcaatatcaaccagcagcgcatcgacttcgtgcatgcggacgcctttgtctacgcgcgccagatggtgcgcaacggacgcctgtttgacgccgtgctgctggacccgcccaaattcatcatcggcagggagggatacgaggaaggcatcaaaaaataccatgacctcaacatgctggggctgcaatgcgtgcggcccggcggcctgttcgtcacctgttcctgttccgggctgctttcccctgcggagtttgagcacaccgtcatcaaggccgcccagcggcaggggcgcaagctccagatcatggcgatgaccggccccggctgggaccaccccttcctgagcacgtacccggaaggccgctacctgaaggtgctctgggccattgccttgtagggaaggactggatattcaatgtttccccgcactttacgaaagtaatgacttgaaaaagcacctgccgtttttatggcaggtgcttttgaaaggttattcttcaaaggggaacaggtgtttttatttctttcccttctttttaagaagtcggtcatgttcaacccggtgcctgccctggtagagaaagtcggtttcaggttcacggccaacggtgtggtcaatcaggttgggaatgtcttccctggtgtatccggattgaagcaggaattcttctaccttggaatattgaccgggaaattcggagacgagcaattccatgaacactttttccagatgcttgacttcgtcttccaccatgacgtttcttgcttcaatgaaagactctccccacgctacatcattgataagaatcttaagctctctcatgctgagttgtttgagttttctcacctgttcttcagagcgtttccggttttcctctgtttgggcaggcatatctttaagatctttataggctgcaatcctgtagggattcttctctccggcatttttaaactgtttcagaatacgggcgtaatagggaagcagaagtttccgaatgaccgtttttttcaggggtggtttcattttcccggaatttcggaccagggttatatatttttccagatggccgcataccatggatttacggttcaggtcctccgcatcgtccatatcgacatccggttccgtttcccggtaggtcttaaaggtaaaaactggagccagggcggcgaggtagcaatgccagactttttcctttaactcagtatggatgttatcctgcgttgtcactttaaaaatgagggcatcttgttccatcttcttgtaaaaggatttgaaccgtttgtctttcagcatggcggcaagctctccgatgccgggggaagggtgtttgtactgctcaaggcagtccgggctttccaactcaggagcagccaaggcggaattccagccgattattggcaagacaaaacaaaggaataagcgtggcagtattttcattaaggttttagccatcattgctgtttctttcaaatttaatattgaatttttcgacaatcgtatttgtcgtagattcatcaatggcttctatatgatatttttgattagttgtgctcaacagaatggtatcttctgcttcgcttccctctcctccatgtcctctatgtacatataatttgcatacaagccaaaatttttgaggattatatttcgaattcttaattgtttctataatttcttcgataaaacgattatcgcctaccatgtcataaaaatgatttttgtttccaacggaaccggcaagattacaagttttatgttcattcgccagttctggtttagtttttggaggcttggaatttttcccttcccacatgaggcccccatcccgttcaatgattttgatctttttgaaactgacgttagtaggggaaagcgttaattgaataaagcctaaaaggccatgttcccctttggagaattgaaacatatcagtagatatggggtttccgtctcccatgtctattataccctcaaatttttctttctttaactttttagggattctgatattgatagtaatttcagctttttgaccttcacttgtttctgctttgatttttgcggtcgcgtccttctccaggtcatcctttgcagtcagagcaatttttaattctccctgaagttgttcggtattaacttgtttgaacccattcccttctatattccatttaagttctttgatggcgcctttcggtttgccgacaagcaagaaagtgattttttcaccgatcccgatgtttttccttttccgatcctcttccttatctcctgttccgcctttgatgtaataatctgcagaacaaagtgctgtttgctgtttaatttgcagggggccggtggcttcttcttccgtttcttccagagtgtcttcctcttcttcatcagcccacagaaaaacggaactgaatagaatcatcagaatgaggatcgacaaacgggaaagaaatgaagggggagttagcggcattttataaaagaataattgaattttatataaaaacatattacccgtcaatatgggtttttgaaatatagggttatgaaaattttataccaataaatggttagtctgttccgtatatggtgcgcaaaggagattgaaacaggcaggcgccggaagaggcgattcttcacatcacctttcaggcgtgttgacggcttttcctcctccctgctttggtgggaaggaatatggcaaaacaagtattacagcggctcagtttcaccgccggggaactgaccccgtggctggccgggcgcgccgacctggaccctgtgtcccgcggcgcctcccggctgaggaatttcctggtcagccccttcggcggactccggcgcaggccgggaacgcgcctggttgcccgcgctgggtgcacggaggggggcgtgaggctggtttccttcaagtactccacgggggtgcagttcatgttggaagtggggcgcggctacatccggtatttcaaggacggcgcgcccctgccggatgcggagggcggcgtgctggaaacgcctaccccgtggaagacggacgagcaggtggggaacctccggatgcagcagctgaatgatgtgatttactgcgtggagccgtccacgccgcccatgacgctggcccgccatgcggacgatgactggaggctggaggcgctggagttttccggcatgccctatgaaagctccctgttcaatgccgtgaggctggaatgccgcatggtgcgggacggcagcgccaacaggctgctggccacggcggacgatgatgtgttcacgccggaaatggagggaagggaatttctgcgcgtcaccaggaagtacggagaggctgttgtggagggaacgcagatgcccttttaccatctgacgaccctggaccgggacctctacaagggggagactttttccatggaccgggaggacggctggcggcaggcctatacctgcatccgtgatttcagccggaaaaacgactaccagcccggagtgaaccgcccggagcggtacacggccttttttgaaaaaggttccgatgccagcgcccgcgtccatgtcagcggcgcgtggacgctggaaacgacgggcacctgggatgcggagtgggaaatctgccgggggtatccggacggctccaactaccttcccaaccagccggagctggtgtggcattccgtgaagagcttccagcagcgggacgggttccggaacaactttaccctgagcggcaatgaagaggaaatgtcctactacaaaatccgcctgatggcgtacaggaacggcgtttccacgggaacgcccgtgttccaggccgccgccggctccttcaaccatgaaatggtagtggaggaatatgtttccccccgcagcgtctacctcgcgaacgcccttcacctgtcctattacgtgctgggcgactgcgagaccaatgactggtcattcggcgcgttcggcgtccggaacggctatccgtgcacggtggagttccaccaggggcggctgtggttcgggggtacgccggggcagccgcagacgctgtgggccagcagggtggatgatttttccgcgttcactcccggcattccgtcggattctcccatgattctgacgatggcggcctcccagcagaaccgcatctcctggattgcctcactccgggggctgatgatcggcaccagtgagggagagtggcgcttgtccgcctccaactcggaagggctgaatgcgtccaatgccgggtttgagcgccattccggggtggggtccgcctctctggacgccctgacggtggaaaacagccttctgttcgtgcagcagggagggatgaaggtccgggaattgttctattccctggaggcggacggctaccagacgcgggacgtcagcctgctgtccgaccacctgctggcggcggggattgtggactggacggtgcagaggagcacggcgttccacgtctggtgcgtgctgggggacggcagcgccgtgtgcatgacgctgaacagggagcagaacgtggcggcgtggcacgctcaccgcctggagcatggacgcatcctgtccgtggcgtccctgcgcggctcccatggcacgccggatgaagaggtgtggtttgccgtggcgcgcggggaaggggagcgggcctgcatcacggtggaacgcctggcggacggcaacgtctgcctggatgcctgcacggaggccgtggtgcagggagagaagatggccggcctgggccatctggcggggtgcggcgccctcctgctggacggggagggagcctgcctgcccgtcagcgtggacggggaggggaatgccgcctgtcccggcaggctggacggagaaaccgtgaccgtagggctggccgctccggcggaggtgaggacgatgcccctggagacgcttgagacgctgggcaggtttaaaaagcagcttggcgcgcgggcgctccttcatgaaagcaccctgaaattccgttacggaacgggccatccggatgcgtggagggatttccagcccggcaggtacggcgtggcggagccttattccggctacgtgcggatgatccacaactacggcatggatgaacagtcctgcttcgccctccgtgtggagacgccggaccagttcaatctgctggccctggtgctggatgtggaattatagggcgcgggagcgcttacggctgttcggccgcctcctcatgggaaagcatgtgcacgatgaccttgatgccgtgcttttccccggccgccttcgccagggagcggatggcggaggccgtcattccgttgcggccgatgatgcgggccacgtccgtcttttccagaatcaggcggaagcggacggcgtctccctgcggagattccgcaacgcgcaattccgcctgttccggatgttgcacgaattgcagggcgatcaattgcaggtactggcggatttgttctacggcaggatgcatgaagggaaatgtgggttatttccattaccctactataaaaccgcctgattgaaaagatgcaattccagacattccctgaaaaagaaagtcgccccggtcgtaaaacgaccggggcgccccaactaccctatgaaactggatccgttaagatccagagagcttttttaacgagcgctcacctgctcgaaacgcaatataggacaggaaaaagggataagcaagtattttttcattgaaacgattgtttttattcagggaaaacaacatcgtattctttacaatatcaggccggaaagaaggatattgttataataacaaaatcatctgccgggaagcagttcataagtgaagcccttaaggtattccgtttccggaatgttcagtaaaattggatgatccggtctttggccgtgttgctgtatcaggcgcagggtggcgggcgcatcgatggcggcgtcgagaacgctttcccggaacaggtccgccccggcgtggtgggaacagcagaaggtggaaagaatgcctcccggggccagaagcttcatggcgcggaggtggatttccttatacccgcgcatggcgtcatgcacggacttcttgtttctggtgaaggagggcgggtccaggataatcaggtcccacttgtgctcccctccgtcccggacgagggccgcctccttcttcaggaagtcaaacgcgttgtccgtaacgcactggatggagacgccgttcagctttgcgttgcgcgctacggcgtccatggcgtcctgggatacgtccacagctgttacctccgcggctccggcaagggcgcaggccagcgcaaagccgccctggttgcagaagcagtccagcacgcggcgtccgcgggcaaagcgcgccacggcggcgtaattgtcaagctggtccaggtacagccctgttttctgccccgtctggaggtcaatcatgaattgcactctgccgctgcttgcggcgaagggttccggctcctgcccgcgcgccacccggacggaaggctcaatgccctccgccgccagcatgggggaatcgttcctgacgatgattcccctgggggaaagcaggtcttccagaacgttcaggataatggggaggcggcgctccatggcgatggtcagcgtctggacgaccaggtaatccgcgtaacggtccacaatcaggccggggaggccgtcagactcgctccagacgaggcgcgtgagcgtttcctccggcagccactggcggcgcagttccaccgcctggctgatgcgcctggaaaaaaagtccccgtccagttcctgcttgcggcgggaaaaacgcctggcgacgatctgggaatgggggttgaacatggcggatcccaggaagcggtccttgaaatccttcagcgccacgacgtcccccggctggggattgccgaagaccttgcgcacttccgtgccgtaaacccagtcgtgcccctgaaaaatgcgtgctcttggagaaataatcaaacctgccatgtcaggaaaggcaatacatgatcagggtggaaagttcaagggtaatgcggaggggtggcgcaagggccgcggctgccggagggaaggggatgtctgttaaaggagaaaagcttttttctcttcccgtgctgtttatgcccttgtgggaagtaagaaataagctccctgccatgctccggatgatggttcgggagggaaggccgggagaacccgcctggtggctggacggaaagcgaagcatgcaacgcacggaacggatgaatttgaaagatgaacggctcaaccctacgcttccagttggccgttttccatttaagccgtgaacctccgctgtctctcttgatgtccgcgccccgggaacaagggcctcccggccctcgtaaatcaaaacaaaccgggttttccttccttggcagtcaggagcgccgcaaacctttgcggcaactgaaggggaactggatggtagcgaagtaatattaaaaatagccttttctgattaaagggcgcgtctttcagccgaatatccatccggctgtggcagaagcctgcggtcattttccgcagcgggaagggtgaaggcttccgttccctggaattttccgcacaagtgaaccaatgcgcatcattccgggactatttcggttgaaaatgcccggaaacgaagtaaaatgtggcgcgttatgaaagtagaaacttttgaaactccccaggatgctgccaaggctttggcaggagaagttgcggaactgatccgcacgcgcgccgccgaaggcaggaacgtggttcttggcctcgccacgggcgccactccgctgcccttttatgcggagctggtccgcctgcacaaggaagaaggcctttcctttgccaacgtcatctccttcaatctggacgaatacagcggcctggaccacgaccatccggaatcctactggtatttcatgcataccaatctcttcaaccacatcgacatgaagccggagaacatcaacctgccctccggcacggtgaagggtgacgagattgccgcccactgcgccgcctacgaacagaaaatcaaggactgcggcggcatcgacctccagattctcggcattggccgcaccggccacatcggcttcaacgaacccggctccgacgataccaccatcacccgccaggtgcatctggacgaactgacccgttccgacgccgcccccgctttcggcggcattgaaaacgttcccaccaccgccatcaccatgggcgtggccaccatcatgggcgcccgggaagtggctctgatggcctggggcgaaaagaaggcttccatcgtgaagaaggccgttcaggggcctgtgacggtggatgtggccgcctcctacctgcagaagcacccgaacgccaagttccttctggacaagggcgccgcttcccagctttaattatccgttcaacaacgaacacgccgcttttcccggttccgtggaaaggcggcgtttttgatggaatgaaggaaggcggaatcttctttttccagcggggatggcgtggagggagctccgtatgtccggaccgttggccccgtgaaggaagattttgtgtcattgaggggagtgtggaacagccgtggctgctccggtggacgcaggccggcaggtaataaagaaggtccgtttttcccttccatggctggtccggcgggatgaaatgggagtgatatttttattgtttattaaaaatgaatgagttttaatgctgtgtgggacgtgttttcctgtttcctgatgcggttccggagcccggaggcaaacccggagttcctgtcagggatttcctttaaaagggggatggcggattggccgtttaaccggctgcacctttttattaggatggagtggcgcattgacaagagtttcattttccgtgcatggttgaaggtgccaatagatgaaaaataaatatatccggcagtgtgtaattaatatttcattcaggaattacagatgatggccggtttttatagatagaacaggaaaaacagaaatatgaaacaaatgaagatactgatggtcgtaaccggaaccgggatgtttcccgacggaaaacaggaaacgggattgtggctcagcgagctcacccacatttacgacagagcgaaaaagcggggatatgacatcgtcatcgcaagtccgaagggaggcgacacccccgtcgatcccatgagtctgaaaacgatgtacatggacaaactgtccaaaagctgctgggacgattcggaattccgggatgtgctgcggcacacgaaaagcctggatgaagtttccggtgagatgttcgactgcatttatttggccggaggccacggcgcgatgttcgattttacggataacgccgttctgcaggaactcatcaaaaaccactatgaaaataataaaatagttggtgctatttgccatggcgtatgcggattgttaaacgtgaagctctcggacggacaatatctggtaaaagataagaaggtcacgggattcagctggtttgaggaaggtctggccggaaagaaaaaggaggtgcctttcgatctggaatccgcgctgaaggaacggcgggcggattacaagaagtcattgattccgatgatgccggaagtagtggccgacggaaatctgatcacgggccaggacccgttcagttcggaaaagatggctgaaacggtcatgggacggtttaatcaatagcagttggcggtgaatggcatgaatttggaagaagccttgaattaccgccgggccgtgcgggtatttgataaaaataaaccgctggaccctgaaaaggtgaaacactgcctggaataggcctccctggctcccagcagttccaacatgcagttgtgggaattcttccaaatcacccggcctgaattgatagcccgcgttgccggggcctgcctaggccagccggctgccgccacggcttcggaaatagtcgttttcgtgacgcggcaggacctgtaccggcagcgggcgcaattcgtcctcgaattcgagcgtggaaacatccggcggaacagcccggaggaacgccaggccaaacgcatcagggaccgggaattatactatggaaagctgatgccgttcctctatgcgcgctgctgcggtattttgggggctttccgggctttgctggccaggggcataggccttttccgccccatgatgcgcgaagtctcggagtgcgatatgcgcgtcacggtcaacaaatcctgcgccctcgccgcccagacgttcatgattgccatggccgctgaaggatacgatacctgcccgctggagggatttgacagcaagcggatgaaaaaactgctgaaattgcctcatggcgccgggatcaatatggtaatcccctgcggcatacgggacggagagaaaggtatctggggcgagcggtacagagtcccgttcgatgacgtgtaccataggctctgacccgccggggaaggaaagttccgctccgccggcagcgtgcggcgtcagcggggagcggggagcgggagaggaccgcctgcgctgcgttcctggggcgcggcatgcctcacaggaaaagggttccggctacttgagccacgccaggaattcatggttcccgtcggttccggtgatgggggagggctcgcagcccatccaggagcggtttagttcttccgtgacgaaggcgcgtatggagtccaccgcccgctggtgcaggaccgggtcccggacgatgccgccggggccgatgtcttccggctggagttcaaactggggtttgatgagcaccagggcgtcccctccgtccttaagcagggggaaggccgcgggcaggatttttttcagagagatgaaagagacgtcggagacgatcaggtccacctgttctccgatgtcttccggagtcatgtagcgggcgttgaatttctccttcacgacgacgcggggatcctgccgcagtttccagacgagctggttggtgccgacgtcgatcgcgtgcactttgacggcgccgtgctggagcaggcagtccgtaaagcctccggtggacgcgccgatgtccaggcagaccttgccttccgcggagacggggaaggcgttcagggctccctccattttcaggccgccgcggctgacgtagcgggggcggttccggatggctatttccgcgtcttcactgaccttgaggcccggtttggtggaagggtggccacccacgctcacctctccggcaatgataagcctctgggccagttcccgggattctacgagattgcgggaaaccagaaggacgtcgagtcgttgcttgctcatgattcggaaggaaggtgcgtacgcaggtatttcatgaaaccgcatggggaatcaagaaaaaccgcgcgaagaaaggcatttgggggcaaaaaggaggcatggcgcgcgctggaacattttacgattgattcagcccggatttataggagactttgcggcgaatggaacaccgctacaggcaattgatgcgcaaggtcaggctttacctgctgacggaggtgcgtaaaaaatcgtgggccagcaaattcctttccgccaggatttttgaccatgtttactggtcctggaacaggcagtccgtggctacgggcgccgcctggggggccgcggcggcgattgccccgctgcccatgcagagcctgtggggcgttttcgcctgcctgtggcgcaaggggaatatccccgtagccatcctgatggcgtggctttcccctcccggcttcacctttttcgccattccggcccagtggtggctggggtggttccttttttcccttgtggggctccccacgtccggagcgaactggcagatgctgaaaacgggagtgcagcaatggtcctgggccccgtttgacgggttgagcatcggcatggtaagcctggagttcctgacgggctggattgtttccagcgtggtgctgggctgcctgtgctacggtctggtgcagctggggtgggggataggccattttctgcgcagcagaagaaaggctgccgggaaataacaagaacccgccggccattcagggcaggcgggtccggaagccgtttgcggccatggcacggtggcgggaaggtcagacggccacttccatcagaagaacggttgagttctggatggcttcaatggtgatggagtccgtatccgttattccggctccgtcccggcggtgcagcaccgtgtctccgatcttgatttctccgtctatcacgaagacgtacaccccggtgttctggcacttgaattgatattcccgttccacgccccggtcgagttccgcccaggagaaccaggcctgctgcatgatggagatatccgtttccggagccaggaaggtggaaatctcattgtgcttcagcaggggcttgatgtcgtagtcccggtatttggggggcgtgttgaccctgtccggaatgacccatatttgaaggaattccaggggttccgtggaactgccgttgaattcgctgtgctggatgcccgttccggcgctcatcacctggatttctccgcgggtgatggtatggctgttgttcaggctgtctccgtggcggagctgtcctttcaggggaatggaaattacctccatgttcttgtgggggtgggtgccgaagccttcttccgggagaaccgtgtcgtcgttgagtacgcgcagggctccgaactgcatgcggtccggattgaagtaattggcaaaactgaacgtatggtatgtattcagccatccgtggttggcatgcccacgggaagatgcacggtcaatgatgatgttcatgattgatagggttggtatggaaagcggattcccgcctgtagatggtttgaccggatggaccccggggctgttcaaggcgcatgacagcatgtccgttgccgtaaaataaatcggcaacacaaattgatggtgcaatgtctcttattttaaggtagcgtgtcgcggtacctgtgcaaacaagacaaggcgtatggctcatcggacattcatgagatggatcaagggattggttcctacggtgattattttgctgggcgccttggtgcttgggtgcatctgttatgtctccatctggggcgctccctcctttgtcgtgcagcgtgtggaacaggctctgatggaaaaaggcattcccgtccacatagagacgctgaagatttccctgtggccccgcgccgtggtgaccttgaagaacgtggagctgctggatcctggtgttcctccggaggcgcgccgccccgtggccctgctgcatgaggcggacgtggccctgaactggaaggagctgatagacgggcaggtagtgccggaacggctgaacgtgaaagggctggacgtcaatcttcccgtggacgcggaaaagcctgaaagagttttttccaccgcagggctgaatgcggagctggacctggggcgtcccggcatggtggacatcgtgaaggctgatgccgtggtgcagggtatccgcgtgactgcccagggggcgttttccatcgggcagggggattccggagattttacgctgacggctgaagacatggccgccgccagggagcagttgaaccaggtgcttaaatacctggaccgggtgaagtggccggaggcgtctccgcccagcctggccgtcaatttgagcgacgacccgaaagggggagtgcgcgtgggcatggatttgcaggctccttccctgaggtacgggaaaatccgggtcagggatttcctgttcagcggggattacgcggattccgtcatcatggccaagcgctttaccatgagggatgcggaaacggccggcttcgtcaatctttccctccaggccgatttgaagaaacgttccctgatctgggatgtccgcagcacggcccccctggtgtcctgggccgtagccattgttgatgaagccctggtgccgcgggagatgaagttcctgagcgagccgcacgtacaggtgtcgggccgtgcggttttcacggagaactgggagggcgtggagcatctgaacgtcatgggctccggttccatgggagctttctccgtgctgggggaaaagttccagagggcctcctgcgatttcagctatgaggacggcaatttttatgtgacggatttggacatacggcaccccggcggcgttttttccggcaaggtgatgggcgtggacggagagatcaagatagacgtgcacagcacgctgcccatgcatgcgatgctggacatggcccggtccattgctccggaagacgtgaagctgccgcctacgctggaaatcaagggagaccctgaattgaaagtgtacggcaccgtgggaatggggaagggctggaaagggccgttccgggtggaccgcctccagattgaagcggccgtgacggacgtctcctaccagggggtggagttcgcctccgccgccgccaggggggaattgatcggccgctccatcaatgtcacccagttggacctggcgcgggaggacggccatgtgaagctggaaggcagctatctgggaaccgatcttgtcttcacgctggaatctgatttgaagcctgaattgctggtagccctggccgggaatttggcgcccattcccgagaatttgaagctgccggaaaaagcctccctgtgggtgcacggcaggctggatattccggaaggcaagcctgtggagcccacgctggtccgggcgcgcatcaatgcggaaaacctggcctggaacaaggtgcccgtgaagacggcgaatgtggaggtggagtaccgccccaaccagctttttgtacagaattgccggatcgggatggagaagggcgtttttgagctgttcgccaacggtttcctggacggccagatgttcgtgatggggcagtccacggttcctctggaaacgatagaccggctgctgggcatgaaggatgacgacttttttatgagccgcttcgtcttccgcaaggattccggcctggagctttccttccaggggacgctgggcctgtacaatctggaaaaggcttacgatttgcaggccactgtttccgcgacgaatacgcggtacaagggcgtggacctgaagtccgcgcgggcggatgcccatctggtgacggaccaattggtgctgaccaacgtgacgacggtggtttccaacgggaattacctgtcttccgccgggttgtccggcggtcccgcggagtgcacgctcaaggccaagagcatagatttccgctttgtccaggatacggtggaggttctgggcatggaggggcaggcctaccccggttataccatgcgcatgttttccgacaacgccgccaaggttttgaaggagtttgtctttacccggcccgtgacgctttccggcggaggcatgttcccgatgggggacgacatgaagctgatgaaggggcgcatccgctttgacgcctccgcggggcgcgtgcgctatcccttgctgggaactacgctggaccttggaaaggcgaaaggggaaattcttatttccccgcagtgggtggtggtggacaagatgaagggcaccatctgggacggctcctttacggggcgcgtgctggcgcagattgacgatggggacgccctgaatggctcctttgtcctccaggacatgaacctgacctccatcgggagatcctacggcaagaagatggagaaggccaccgtgcacggggccattgaattttcatccaagggaggcaatatgaactccatccaggcgaagggcgaggccgccctggtgcatggggacctggtggaaatccccctcttcggctttttgggggaagccctctccaattatattccgggcctgggccacctgatcaattacaagatcaccagggccgactgcgatttttccattgagaagggctatatccgcaccagcaatttctcggccaagggcagcaatatgtccctggaaggaggcggctggatacgccttgccgacttgcaggttaattctgatttcaagctggggcttcgcggcctgccggggctgattacctctcccgtcttcctgctggcggggggattgttccaggtgcgcggcacggggcctttgagcaatgtttcctggagctttgcgccgttctccggcggaaaagcccctgttccccccgcggcggctcccgcccggaggaggtagagaaggggaatgccgggtttcccggagaaaagcgtcatggagcgccgcatgcccacgcggcgactgaacggaaacgcggctgcaagccgcgcccttttgtagtcccgtattggattgatgtttcccgtctttaatgaaccggtccgccaacgctcattgataatccggttgacacacagcatgcaatgttccgtgacgcagcagggccgttccggacaatgccggaacggccctgctggcttggagagtggaacgtctccgctccactctccactctcaaacttcaactctcctcaaaagtcataccggtagcccacgcttccgttcaccgagttggctccgtcacggaagtccgcgttcccgttgatgaagaccgttccctgcgttcccaccggcacgctcagccccgctcctatttgcagagccgtcgttccaaccttggtcccacgcacgctttgcatgaagccggggttgcccagcagcgccacattggtttctccgcggcggtcgcccatgtcctgggccgcgttcacccggaactcagccagcgcttctcgcccgaagatgttgctgccaatgagccccatccaccggccgcccagcgcaaccgttcccgtcgtccattcctgcttgcctacgttcaggcccgcgttccccgctcccgtttccgtgtagccgtccatgcgcgtcgtcaccacggaggcgttggccaggggctgcaggatgctgctcctgtcttcattgaggtacacgtcgtaggtcagttcatacatcgctccaaagccccacccgctggtgttgccctgcgtcctgtagctgccttccccgtagttgaccgtgcggttgagcttggcgttgtcccatcctccggaaaaggaagaagcgtcccagcgtcattcatcatggattcctgtagaaaatggatttcctgagggagattccgtcttccttctgccagaaaccatgatacagacggaaacggcaatgatgagcaattccagaaaaaaagaccagtgcagcaggaagttcagccaccaggggtggtactgcgcctggacagtggccagcgcgtgaaagcgcatggaccacggagccaggagagggatgtctcccacgatgcagtccagaaggaggtgcaggaagccgctcatggaaaagatcagcagccatgttccgcccgtgctccatggtttgatccggctggctccccatgcgaggagcatcagcgcgaaccagacggaaggatagtgcgtccagtaggaatgatggtggtgctggcggccgtccagggtataaaaataaaacaggtccaggtccggggcaatcgcccccagaagggcggcggtcatgacggccttccttcccggtgtgcgtaaacggatggtttttgccaggagatagcctgcaggcagatgggcgatgaacatgagcgttcaatagaagaaaaacggacaaagacggacagtccgggtgcgtactacctggaaaaaggtttttccacccagtcaaaggatagttccctgtttccgcctcccacggaagaatagactgttctaacgccgctggatgaaggattcttccagatgagggacagttcctcaatccggctttcccccgattccaggaagatcttgtgaatgcggaggccaggcaggcgccaggccctcacgtccgggtggacataggtggtttcccaggcggtttgatgttctttgccggttccgcacgtccatgtaatgctcaaggacatttttttatcaggggtgctttttccggccccggtatattccacactgacgggaatggtcccggaagattgcgggatggctgccgggctgcaaacaagggcggcgagggataggggaaggaggctgatcattttttcacaagggaggggggcgttgagaaaaaagggggcggctggcctgcatcagccgccgcccccttggagagggggttatctgccggatttgcccagcttgtacccggcgtaggtttccgtgttgtacaggggctggttgtccggcacggcgtagccgatggatttgcggatggcgaggaagtccgccacgccttccggtcccacctggttcaggggggccttgtgcagcccggccatcagcaccatgcggcagtaggcgtccgcgttttccatgaaccattccgcttcttccacgtcgcgggctccggtgatcacgccgtggttttccatgaagaccacggtggattgtttggccgcttccgccacagcttgtgccgtctccagagagccgggcgtgccgtagggggccagcgggatgtggcccaggaagatatccgcttccggattgatgccggaggggggaacctgcccggcgaacaggaaggcgttgcagtgcgggggatgggcgtggatgcaggagttgacgcccacggatttcatcatggagatgtgcgttttcacctcactggtggaggggcgtatgcccgccttctggcgcgcgtccatgtccaccaggcagatgtcttccacggtcatgaagcccttggagcacagggtgggggagcagagcagcaggttctgcgccacgcgcacggagatgttgcccccgttgccgtccacatattcgcggttccacaggcggcggcctatgtcgcacatgcgttccttgataaccaggatttcaggggaatggaagaattcgttcacttcctcccgcgtgacggggttgtatttttcccacgggaacaccttgtcccggaggggaggggagattgaccagtcttctgacatatttagttgcgtgttagtggttgagcttttcgtaggcggcttcctggggacccggcatatacgtccggtaagtgatgccgaaggcgtccctggcctgctctggcgtagagtacaccccggcgcccgcaaaggcaaacatggatgcgcccagcacggtactttcagatacttcagagaccttcacgggaatgcggaggatgtccgcgcgcatctgggtccagacgctgtttctggctcctccgcccaccaggatgaggaattcgcttttgaacccgcccacggattccaggcggcgcaggcgggatttcagccgccaggtaagcgcctccatggcggcgcggtaaatgtggccgcgcgtccggcccagcaccaggccgccgatggagcctttccggtcccctgaagccaggaagtccggaaccatcgttacgccgtcgcagccgggggggatggcggccgcttccgcatccatggtatcgtaggattcaccgcggaagcaggcggctttcacccattcaatgatgccggaaccgagccattgcaggccggggttcagaaggcccggttccgcgtcgaactccgccgtggctccgtcctcataatcctcccgggtcagccgggcctgtgcggagcgcgccatcaggatttcccaggtgccggaggacaggaccggctggtccctgtccgcgccggaaccgaagatggcgaactgggtgtcgtgccccgcggagataacgggaacgccctccagggcgggaatgcccatggccgccgccgcttccggagtaagaacgccgatggtctcccccgcgtccaccgtgggggggaagaggccgcggcgcaggcctaggcggttcaggataagctcggaaaagtctcccgtttccaggtccgtgagctgggaggtcccggccatggtccggtccgtcgccatgacgccggtgagcttgtacgccaggaggttggagatgaagagccacgcatgggccttttccagcagctccgggcggttttccttaatccagacgagcttgtaaatggtgttgaaggcaaaggcgcccacgccggagatgcggtcaagctcttcctgggagatgtacttgccgatgtttttcatgacctccgccgtgcggggacacttccaggatatgacggggtaaagctggctgccggaggcgtccaccagcgcgccgtccacgccgaaggtggtgacggttaccgcccgcacctgttccacatccaggccctcaagggccttcacggcgcattcggagagctgcttgaaaatccggtccgcgtcccagacgtggaattccgggttttccttaccgggcagcgtggcgttcggctgcgaggccttccccgcgatgacgccttgttcatccacaaccatcgcgcgcacgttcgtcgcgccgcagtccaagcagagggagtacatagagaaatactaaatattgaagattagatactaaagggaaactgttcagagattttgcccggcaagcgtttttgtcgtagcggtcaatagccgcattaattccaggcaatcctgtttcaagctttcaaattgctggtccgtcaggcaggaagttgcatgcagaaggcggagccaataccaagtctccgaacattcttttagtgaaatgtgtactttggagaagaagtcttttttgcttacggcataggaagcttctgcgaggttggctcctatgcttgttccggagcgcagaatttgctggatcagtgcctgctcgcaccgttgcttgcgaagatggcggcataaggaaacgatacgaatggaaaaggcaaaacttttttcatgagcggcactttcgttcatcttttagtctttaatcattcgtatttagtctttgatattaacgctgaacgtcatcaggggaagaatgtcttcccctgatgaaaaggtcagtcgttaatatttgccgtacagcgggccgtagttggcgcaggcgcggaagtcggcgccttccgggtccgcggtgccgtggaggccccaggcggagggacggtagatttggtcgtccgggatgttgtgggcgtatacggggatgcgcagcatggaagcgagcgtcaggatgtctgcgccgatgtggccgtaggtgaaggctccgtggttggcgcccatgttggccatgacgctgtagacgtccgtgaaggctcccttgccggtcaggcgcggggcgaaccaggtggtcggccagcccggatcggtgcgttcgtccagggtcttgtgcaccttggcgggcaggtccacggaccagccttccgccacgatgaggacggggccgaggcccttgacgatgttcaggcgcatcatggtgacgggcgcgccgcccttggtgacgtagtggacggagtagccgccgccgcggaagtattcccggttggccgggcaccagacggcttgttccatcatggttttcgcgtcgtccggggtaacgtcccagtgctttttcatgacgggcttgccgtccttgtccgtgcaggccatgcagccgtccagggccgcggagccggagttgatgaggtggatgatgccgtccttggcatggccttccagcttgtagcccgtgacgcgcttcacggcttccgggctccagtaggtgcgcacgtccgcaaagacgttggcctgtccggtgagcaggtagccgaagaggaggcaggctccgttcagggagtcgttttccgtggcgaagggcatcggcgcgcgcgggccgttccagtcaaaggtggagttgagcagggtttccgcaatgtctccgttcgggtagaagtccgtccagtggcgctggccctggaagccgccggcaatggcctggtagcccatggattcctcttcgcggtcgattttcttgagcttggggttgccctgcatcatgtcccggaagatcatggccatcagcacgctttccttgaaggtcctgcggcgtccggcttcgtccagcttcaggtccgggcggttcttgtcttcggcgaatttgaagacggcgtccgcccattgcatggcgaggtcgaattccgcttcgtcgtaaatcttctggtccatgcggcggcgcacttccgtcatgtccacggcctgtacgcggatgcccaggtagttttcccagaaggactggtccacgatggagccggcgatgcccatggagcagccgccgatggagaggtagcccttgccgcggagggtggctacggccaggccggcgcggcagaagcgcaggattttttcagccacgtcttccggaatggaggtatccccggcgtcctggacgtcttttccgtaaatggagaaggcggggaagcccttctggttcagtccggccagggcggcggccaggtacacggcgccggggcgttccgtgccgttgaagccccagatggccttgggagtgaacgggtccatgtcaaaggtctcgctgccgtagcaccagcagggcgtgacggccagggagacgccgacgttgttggccttgaatttgtccgcacaggcggcggcttccgccggaccgccgatgcaggtgtctgcgatcacgcacttgacgggttcgccggaggcgtggcggatgttggcctcaatgagagccgcggccgccttggccatgttcatggtttgatcttccagggattcccggacgccgaggcggcggccgtcaatcgtggggcggataccgatggttggtaatgctgttttcatatcttgcgtaggtgatgtgaagctggttcaggcctgggcaggcgcatcctcttcctttttcaaatgggtgttgcggaagaagaagccgtagattagtaccacggcaaagcagatgatgggaataaagaaggatgaccgcaccgctttttccacaaagttttcctgggccgtctggaattgcttcatgtccagggggtcggaaatcaggttgccaagtacctcggcctggttcccggagagcgtggtgagcgccggaatcagggagaattgctggatctgctgttctctcccggcgggggcgggcaggcggtccaggttggccttgaagaccgccagttcttccggcttgaggccggagcagccgggcagggatttggccgcccggtcaaaggcttccccgtccagggtatggagggaaaggaaggtatccaggtttttctggaatttggcggcggctttggcctgttcttcccccccggcgggattggcttccgacatcttgtagagggccagcatggcgccggagacggatttgcgggagtccgctgcttccgcctgcgcgatcaggggacggtcaatggattcaaagtaggccacctggttttttaccgtggtgttgtcaatgaaggtgcccatgtacggggtgatgaccgcgccccccagaatggccatgatgaggcccgcggcgcccagcttcacttcggaacccagtccgcgcagggcgatgccgtaaatggtggggaacatcagggacatgcagccggagatgcccaccagcgtccagacggagatttccttgggcaggtacatggtgcccaggcagcagaggatgcccgcgatggcaaagagggacatcatgttggccgggttgaattttttcatcagcgccgtggtgatggcgcggcaggcgatgaacagaacgatggagaagatgtagtagttggaggccgccgcttcctgcatgccggggaagacggacatgatgtacttgatggtccacgtccagacggcgatctgcacgcccacgtagaagaactgggccaccacgccgcagaagtagcgcggcagcttcaccagcttcatgagctggcagcggtagtccggcatgatgagcaggaaggcgatgggcccgatcatcatgatcaggatctgctgcaccatgctgaattcaaaggtggagtagtactggaacaggaagggaatgaggatgaaggcgacgcacaggcccaggcggccgagcttggaggaaaggggctgcgtgttttcccgggtgggcacgctttcatcgtcggacttgtagcggcagaagaagaaccagatgacggcggcgatggcgaccaggcccacatagggaacgcacacccagaagagctcgtcgctgacgatggcgttcagttgttccgggtccatggccttgcgggtgtccatgtccgcatcattcaaatgcgccaggatgaagtatttggccaggaagatgcccgtcagggagccgattgggttgaaggcctgggcgaagttcaggcggcgtacgctcgtctcctgggaccccatggagaggacgaacgggttgcaggtggtttccaggatggagaggccgcccgccagcacgaagatggctaccaggtaaatgtcaaaactttgcccgatggcggcgggtatgtagcacagcgcgccgatcatgtagaaccccagcccgatgagcaccccggccttgtaggagaattcctccagcaggatggaggcgaagatggcaagcaccgcatacgccccgtaaaaggagatttgcacccctgcggattccgaagcgttgatcatgaagatcttgctgaatgccgggaccaggttgtccgtcatgttgttcagcagcccccacagcgcaaaacaggagaccagcatgaagaacggcagccggtactgtttgggaacgatcggcacggtagaggtacggtttttgtccatattgcttttgtcaatctctcacaaggacggcggtgcgtcaatctggaaacggaaaagagtccagaaatcatccaacatgttgacaaataaaacaaagcggtatgtttgggttgggatatcctgtcagcgttcacgggagacccggcttcttcttgactcctgtttccgaggcggctaaggatgggctgatgaagaagtgcattcttgccgtttgtcttgggctggccggtttttggggcgttcaggcggaagattcccccgtcgccaatccggaaaagacggatgaaaaaagcggcgtgacgctgccgtccggagaactgctgtcagaccatgtggcggaggcggagtttacgggtattattcaccgcaagtgcaggttccttacctccctctgtccggacaagtgtgaccacgccaaggatttcgccgctttccggatcatcaagtatctggattaccggaaacccggcaagtacggggatgaaaagcaggagcagctgatgattgacgtcaatccggcgcacaagcccatcctgcagggggcggacatcctgaaaaaggtagccgccctgaagccgggggacaaggttgtccttcactggtcccattactacatgcaccgggattccagctcctttccggaacgtcccgtgatttccatggagccggcgtctccttccagtgaaaagacgaaagattgaggactggtctttctacaggcctcccaggcaaggctggacgcggcggaaaagcgtgtgttaggaaacaggctggcaatgacgcagctccgggcaagattgttccggttcgctgcgtattgtcctgcgaaacacaccataaatacgatgcgtttacctttgaatacattaacggggcttgccctgctgtgtgccctgggcatgtctgttcccgctgccttgggtacggaaagctttgagcaggccaaacacggcaagtttaccacgctttccaccaagtacggccccatgtcctgccgggacggcgtggcggaaatcgggggagggggaaaatccgggaaatcttccctgcggatgttcggcgggcaggataccgaactgaagctggacttgaaggatactccttccagggaagtacggctgtccgcctgggcggagcgctggaccggacaggccccctttgaattttccattgtggccgtagggcccaagggggaaaagaagatttatgacggcaaggacatcaggacgggcggcttcaataccaggatagaggccggcgttcccgccggaacgcgctccctggtgttcaagctgacgtcgccggagaacaaggggttgaagctggacgacctgttcatcgtgccctgcatccccatgaaggtgaatccgcaggtggagatggcttcttccgcctatccggtgatggtgcgcatcccgtgcagtcccgttctttccctgaaggttcaaacggacggctgtcttaatcctcagttcctgacggccgtcaatctggattttacgggcacgacgaagctttccgacattgaatccgtgacggtggtgcggggagaagaggctccgcccattcagcacggggaagacccgtttccgaaggatgcctcccaggtactgggtacggtgaagctttccggctcctccaagccccaggtttccgtgaaggggaagctggagctggaccccggcgacaattacctgtgggcatgcgtgacgatgaagaagggcgcctccctggacggcagggtggtggtgcgcccggccagcgttgtggcggggaacaagctgatgaaggtggccaatgccgccccggtggcgcagcgcatcggcgtggccgtagtgaagcacggggatttcaactccaagttctaccgcattcccggcctggacaggtccaggaaagggactctcctggccgtttacgacatccgttacaaccattccggcgaccttccggccaacattgacgtgggcgtgagccgctccacggacgggggccgcacctggtccgacgtcaagatcgccattgacgattccaagattgccccctccctgggggctaccaagggcgtgggggaccccgccattctggtggatgaaaagacgggccgcatctgggtggccgccatctggagccacaagcattccatctggggcagcaaatccggggacaattccccggaagcctgcgggcagctggtgctggcgtacagcgatgacgacggccttacctggtccaagcccatcaacattacggaacagaccaaggacaaggactggcgcattctgttcaacggccccggcaacggcatctgcatgaaggacggcacgctggtctttgccgcccagtactgggacggcaagggcgtgccgtggtccaccatcgtttattccaaggaccagggcaagacctggcactgcggcacgggcgtcaatgagcagacgacggaagcccaggtgattgaattgaaagacggctccatcatgatcaatgcccgctgcaactggggcggctcccgcgtggtgggcgttacgaaggacctgggcaaaacctgggaaaaacaccccaccaaccgcactccccagttgaaggaacccgtctgccagggcagcctgcttgccgtggacggagtgccgggcgcgggcagggtggtcctgttctccaaccccaacaccacctccgggcgttcccacatgaccctgaaggcttccacggatgacgccggttcatggccggaggacaagtggctcctttacgatgcccgcaacggctggggttattcctgcctggctcccgtggataaaaaccacgtgggcgtgctgtatgaatcccagggtgctctgaacttcctgaaaatcccgtacaaggaggttctcaacgcgggcagtgcgcgctgacgccgctttcaggtaatcgtttacgggccgtttccttccgggagcggcccttttttggtaactgtctttgggtaggaatttctccaaagcgcaggggagggagttctggtatgagggacgggaggacggaaagagaagcttgaaacgcgcagggggagtgaatctgaaagaggcacgaatcaagcttccgtttcccggcggcggtgtttcttccaggccgcgggagtgtgagtccctggtggctgcgctgctggagcaagggccgccgggcccttgtaaaaaagctttctccggatcagccctttttcctgttccctggccgtcactccagaaaagaagccagcgcgtccttcagcatgttcctggcgcggaacagcaggcttttggtggcgggaaccgtcatgtcaagcgtccgggctatttcctcgtaaggcatgttttcaaagcggcgcagctggacggccaggcgcgccttttccggcagggcggcaatcgcttcatccacggcccgctggagttccgtgtgctccatggcttcatccggggcctgggaaggttccaggaacacggtcatgccgccttcctcctccatggcgtccgcggaggtggtgggcttgcgcttctggcgccgcacttcattgaagaccagattgcgcaggatggtgaacatccaggtggtgaagcgtgcggagggctcataattcccggctcctttccagatgcggatgaaaacctgctgggcgatgtcctccacctccggcccgttgttcagcatgcgtgctacggtggcgtacacggagttctggtgtttgcggaccagcatttccatggcggaagcgtcgccattcctgactctcagcatcagctgggcgtcctcgtctggttccgcaggcggcatgtcttgtgcttcgtccatgaaattcccttctataaaccccgtgtccggtgaaaggttgcatccggaagggcgcatgccccggaaaaaaggtctatcccatttttccgcggctgacgagatgaaaacgggtctttcttctctttccgcgcaaggctccggacaaaacgttttgctcctgccgatggccggggacggctgagggggtggaacattccgttcttttcccggtgggaaaacggagcatgatggaaatacggaggccaccctccatgccgctccggtttgacaatgaccggaggggcctgctagggtaagggaaaatgaaagggagaaacgccggtaaattggtctgtttaaggaatcatcctgaattcctttccacagcttccgtctggttcggctccaagtgggacgttcccgtagaggcctatgaggaaagcatgaaggaatgcatggaacggaaaacgggcattccgcaatggtacgtggtcatgaacggacagggggcaatcattgcgggtgccggagtgattgaaaacgatttccatgaccggaaggatttagcccccaacttatgcacgctatttgtggaaaaaaggcatcgcggcaggggcgtggccgcgtccatcctggactttgtgcggaaggatttggctgcgctcggatatccccgtctctatctggtgacggacctggcggggttttatgaaaaatgcgggtgggaactgctgacaatggcgacgggcggtcatcatgcccgggaacgcctgtatacggctcccgccatggaaaccggacccgtttgacgggggaaggccggaacttcgttcttccggtcttcatgcgggggcgggaagggattgttgcgcctggaataaggaggaaagaaggggggccggacacagtaggcccttccggatggtacgcgcctgcgggaggactctgttcttgacagcatttcctgtctgcctgataacttgatgatacagatacccctaacagtataaggaaacgccgcaatgaaacaatgcatgaattctgaaaatttgcatcgccgcctcaagaaaatcatcggacaggtgcaggcgatcgacaggatggttgacgaggacgttccctgtgaagatgtgcttgcccagctcaatgccgccaagtccgcattgcacaaggtgggccaggtcgtgctggaggggcatatcagccattgcgtccgggacggactggagcacggagacccggagcagaccatcgcacgctttaccaaggcggtcgaacggtttgccaacatgatttagcaggaggggtcaagagccttttttcaaccgccatttccggggatttttccgtctcatcttgacaaacctatacccctataggtatataaaacccgtacctgcatgggtatggaaaggagaatcatatgctggaccgattggaaaaactgctggaatggggagggacaaggcgcgacgtcgcgctgctgtccgtttccggattcgcgctgctgttgagcatgcttgatattgaaccgcttccctttggcgtcgcgtggatagccattgtgctgtgcggcgttcccatcgtgctggaagccgtgcttggactggcggcggcctgggacatcaaggcggatgtgctcgtttccatcgcgctggtcgcttccgtcatcatcggggaggactttgccgcggcggaaattgcgttcatcatgcagctcggcgcgctgcttgagaacctgaccgtggccaaagcccgggcgggaattgaaaagctggttcatctgaccccggctaccgcccggaaagtggacggcttccgggaggaggtcattccggcggaacaggtatgtgcgggggacgtcctccgcgtgctgcccggagagacggttccggcggacggagtgattctttccggccacacttccatcaaccaggccgtaatgacgggtgaaccccttccggtggacaaggaagctggggacgaggtttccagcggaacggtcaaccagttcggagcctttgacatgaaggcgtccagggccggggaggacagttccattcagcgcatggtccgtctcgtccaatccgcggatgcgggaaaggccggaatcgtgagcgtggcggaccgctgggccacctggatcgtcgtcattgccctggcttccgcagggctggcctggctggtcacgggcgaactgatccgctccgtcaccatcctggtggtattctgcccctgcgcgcttgtgctggctacccccacggcaatcatggcggccatcggaaacgccaccaggcatggattcctggtgcgggagggggatgccctggaacgcctggcctccgtatcccacctcacctttgacaagacgggaacgcttacccacgggacgccccgcgtggcggcggtacgcagttttctgccggacctccccgaacaggtgctttacaggtatgccgcctgcgcggaactgcggtcggagcaccctctgggcaaggcggtcgtccgctgttaccggaagggagaaacgcgggagcttccccagccggaacagttccgcatgattccggggagaggcgtccaggccgtcctggacgggagggaactgatggccgggaacctggaattgttccgggaaaacgggctggaggtgcccggcgaagtcagaagggcggcggaacagtaccaaagggagggatgcaccgtgatttttctcggcatggaccgtaaggccgcaggcttcatcgccctgtcggacaccctgcgggaggacgccgtctccaccatccgggaagtggcggaaaccggggtggttcccgtgctgctgaccggagaccatgggaatgccgcggcccatgtagccgggcagctaggcattgagcgggtttacgcggactgcctgccggaggacaagttcaactggattgacgcattccagaaggaacggaaccgggtgtgcatgatcggggacggaatcaatgacgctccggctctgaaaacctcccatgccggaattgcgatgggaggcataggcagtgacattgccgtggacgccgcggacattgtcctggtaagcgacgatatacgggaactcccccatctgctgcgcctggcaagacgcatgatgcgcacgatcaagtgcaatctgacgttttccatggccctgaacttcatcgccatcatgctggcggtgggcggaatattgaatcccgtggcgggcgcattggtccataatgcaggctccgtcgtcgtgatcgtcaattccgtctttctgctgaaatgggggaggaagaagagcatggctccccgcggcgcggagggaacagctccataacgggggagaggggagtatcgcgcaccctgcggacgcatgatatcaagttgccgcattggcatgcggcgctcctgcgccgtgggtttggcacccggaccggaaaacgcttggatgggacgggagcccgtgctatctttttcccaagttcggcaggggtgcccaaacaaaggctgagattgcgggaacggcatgctgttcccgcagaacccttcaaacctgatgcggataattccgccgcagggagttcgattgaacgggcatgccccgtttctcgggaaggtctcgtttccgctgttcccctgccggcacagaacagcatccattccatgaacgacaccgccaatttgacctatcccggctcccgacgcatttatattccgggccgtctgcatccggacgtgcaggttcccttgagggaaatcctcctgagcgataccctgctgccagatggcaccgcccactccaatgaccccgtgcgcgtgtacgattgttccgggccgtggggggatgcggcttatgagggaaccccggagcaggggcttcccgccctgcgcgccgcgtggatccgggtccgcggtgatgtggaggaggcggaaacggaccagggccgctgcctccgggctgcggggggcacgcctgtgactcagcggcattacgcccgccagggcgtcattacgccggaaatggaatttgtagccatccgggaaaacctgggcagggaagaagcgttcaaggcggtgtatgaccgttatccgaacgccaagagccgcccggacgaagcccgggaagtcctggaggcgctcaccatgatgccgcggccgtccgaactggaggcgcaggaaggcttcggcccctccagcatggtggcccgcgaccggctggaccaccagcacgcgccggaacgccggaacggctgccgcatgcccgcttattttacgccggaattcgtcagggacgaaattgccgccggacgcgccctgattcccgccaacatcaaccatcctgagtgcgagcccatggccatcggccgcaacttcctggtgaaaatcaacgccaacatcggcaactccgccctggggtccggcattgaggaggaggtggaaaaactgcgctgggccatccactggggggcggataccgtcatggacctgtccaccggaaagaatatccacgccacgcgggaatggatcctgaggaactcccccgttcccatcggtaccgtgcccatttaccaggccctggaaaaggtgggcggcaaggtggcggacctgagctgggaaatcttccgcgacaccctccttgaacaggcccggcagggcgtggactatgtgacggtgcacgccgccctgctgttccggtttgtgaaccacactgcccgtcgcatgacgggcatcgtctcccgcggcggctccatcatggcgcagtggagcatgatccacgaacaggaaaacttcctttattcccactgggatgaaatatgttccattctggcggcttacgacattgccgtctccatcggggacggcctgcggcccggctccgtggcggacgccaatgacttcgcccagctggcggagctggaagtgcagggggacctgaccatgcgcgcgtggaaagcgggcgtacaggtcatgaatgaggggccgggccacgtgcccatgcacctcattgccgagaacatgagcaagcagctggaatggtgcatggaagctcccttttacacgctgggtccgctggtgacggacatcgcccccggctacgaccatattaccggagccatcggcggagcgatcatcggccagcgcggctgcgccatgctctgctatgtgaccaggaaggaacacctgggcctcccggaccgggaggacgtgagggaaggcgtggtcacctacaagctggcagcccacgccgcggacctggcgaaggggcacccgtccgcccagtggcgggacaacgcgctggcgcaggccaggtttgaattccgctgggaggaccagttcaacctttccctggacccgcagaaagcgcgttcctaccacgacctgacgcttccccatgccaacgccaaaaaggcccacttctgctccatgtgcggtccggacttctgcgccatgcgcctgagccaggacatccgccgccggtcccggcagtagggggaccgaaggcgcggcgtcacggcagccgccgggctgccaggagcgggaacgtctgaaaaagaatgacaagggcagggatggtgctatgatgcctttaagatgaagaattcattttttcctgtccttggcgttctttctctggcttctgccgtggtttgttccgcatctcccgtctgggagacggattggagcaaggctctggagaaagccggcaaaagcggacagccggtgctggttgacttcaccggctccgactggtgcccggggtgtatttatctgcggaaaaatatttttgatacggacgccttcgccaagtatgcggaagacaacaacttcatgctggtggagctggattttcccaggacggaggggaaaatgcctccggaacagctcaagtttcatgaggaattgatgcgccgttacgggatttccgtatttccttccgtcctgctcatggaggggaatggagctccctatgccaaaatagtgggaccctccagaacggcggaggaatacttgaagaaattggcagccgccggggagacgaggctgaagctgaaagaagccgtggctgcggcccgcgcgctggaaggaaaggaaaaactggaaaaactggtgcaggctatcaagctgcttccggaggatttgcagccctatcagaaggaattgatcgcggaaatctccgccctggacccggaggacaaatacggatttgccgggaaggctgaaaaagccgtgaccctggcggcgcagcggctcatgatggagcaattttacaaaaaacacgcgggccccttttccgcagaaaaagtccgcgcgggacaggaggaagctttgcaaatgctggagaagcgggacctcctgccggccatccgcctggaaatagccaaatacgtcagcgacgggtatgcgctggagcgcaattatcccaaggccctggaatacctgaacatggcccgtgccgccgatccggaatctccggcggccaaaaagctggagccatggatcaacaatatgcagaaaataatcaataagggaaaataagcccttttcatgaaggcattccctcttcccgtgaagaggaaaactatattccgtcttttattttaaacaaaaaaatgaacttgctgcgctatgattgatgaaggaaccgaacatgcagaaatgaatacgtccgcctacatcagggaagaggaagttaatgaagaagacagccatttgctgagctgggatgaatggctgcggaggcacgtcgctcaactgctgctgtttgcccgccagcagtcccgctctccggaagatgcggaggacatccttcaggatgccctgatacggctggcgcgcaaggaggcctccggagagtttgtgggagggcaggaggcatggctttcctatgtctttgcctccatccggcgtctggcggtggactatggccgcaaatccgaccggcgccagaaaagggaggatgaagcctgcgccgccgaacaggacgaggatgtttatgcggacccctggttttccagcgccgcggcggacgaggagctcaagcagttcatggaaatgcagctcaggaagctcccttccaaattctccgaggtcattgtcctgaaaatatggggggaacaaacctttcagcaaattgcggaaacgctggaaatctcacaaaacacggtggcgagccggtaccgctatggcatcgacctgctccgcaaggcgctgagaaacaaaaaagaccaactctaatgccgctccactcttatgaaacatgaaacaacatcatccgccgcaggggaggaaggcggcggtactgccgccatgcagccccttcccgtatccgatgaactgatttcccgcctggccggaaggtgtgaggaaatcttccccctgaacgaccgtctccggcatgatgaaatatccgatgaggaaattcatgagatggaatcccttttgaagcgtttgcggcctgccccggtgagggttctgttccgggaacaatgctgttccctgatgtgcgccgagtccgaacaagaaatggaaacccggctgaaaaggctttccgcctcttccatgctggaattctccgtgtgcaaaatggcgcaggccatggactgcgccggagaggcgaagcaggaaaaagcggtgaaaatccccctgtggcggcggcttgcctatatttcaggcatttccgtggcggctgcggtgggcgccgttctgctggttcaaaatacgctggtagcgcccggcggcacggtggccggagggaatgaggcggaagccggagctgaaaagacggaagcccctgtactgcccggggaaaagcgggagctgctgcggaaacccactctttttgaattgcagggcggagacgagcgcgtgcccgtgattgctcctgccgtcatccgtagaattcttcctgaaaaggaatattaaaggaccgccgcgtgaacgcctgtgggcagcgcagttgaaattttccattctgttgctgcaagtgttcgcgctctccggttctgttccttgttccgcgtctctgctttgtgaagaaaaagaaagcgccctggatgcatggcggagctcttttcccatgcccggaaataaatgttctaccgggagggagatctccctgccggtggagggaaaggcgtccggataaaggtctcacccaagtgtgggttggcttggctttactcccgtgatgcgttccttggcggtctgccgacgctgcgggacggaaggggacgggcggggccctgcaaaaaaaatgcacaaattttgaacattgcgcggacggatgctgtatattatctcacatggatatgaaaacctgtatctttctgacattgggattgctgataggttcgggctccggatattccattgaccggcccgcaggaagtacggacaaccttcagccgccgcccttgactccctacacgccgcagaccaagccgctgccctcttccagaccggccaggctgggcattgtgcccggcacggtgccgcaggcagttgtggctcaattggaactcagcggatttcccggcgtgctggtgaccaaggtgatgccggacagtcccgccgccaaggccggactccaggaaaatgacgtcatcatcaagctgggggacatctccctgtccggcccgcgctccgtgacggaagccctgtctgaaaaagttccgggagacaagattacggctgtattctaccgcaagggcaagcgggaaacggcggatgtcacgctggacggcggaacgctttctgcggaagaaatactggcggcccagggagatccccgcacccagccgcgcgtggttccctccgtccggcgccaggcggttcctcccgccggaatggccgcacggcccaaccttccgcagcgcattctggacatgcagcagatgatggatgattttttgagggactccgcgattgatgattcgcggatggatgacatcatcggccggatgaacctgaccccgggagcggcccagatgctccggagcctccagaaccttcaccagatgcccatgccccccatgggcaaggtgtccggcggagggcagagcacgtcttccgtccggatgtcggacgccaacggaaccattgtggtttcttccagctccaaggcgggcaccaccgtccatgtgacggattccgcgggaaaagtcctgtactccggcccttacaacacgccggaggaaaaggaagccgtgccggaagccgtcagggaacgcctgaaaaacatagaaaccaacttctgcttttaacctcttcatgaagcaatggagaaatccatgatcattatgttaaggacggctgccctgtgtggggcagcctttttcatgcagaaaaggggctttttcctcttctgaaaaagcggcgcgttccgggaagaaaaagcacggaacagcagcaggacatctattccacatccggaggaacctccggaagaagatggaaggaaaagaaaggggatatccttgcggcctccctgtgggcaggtcttgaactccttttgaaaagcggagtgcggcaggaactacagaatgccggtcaatttccggtacgtctccagcgcgaaggaatccgtcatgccggaaatataatcaagcatgtgcgccaggcgtgcgtccttcccttcgtcatccttgggcagaccggttccctgaagcatgatggctacttttttagactgtccggaggaaggatggttcacccactccatgaaaaagtcgatcagctctcccagcaccttgtagcccatggcttccacttcaatcacctcccgggcctggtacacgttctcaatggcgtactggtacaatccgttcagcggcgcggccagttcagaacggtcaatcagggattgatccatgctcccttgcagaagctcctcttcatgcttcatgaaactgtccacggcggactggatgctcctgccgatggcgagcgcgcgcatgtaatggatgcaggaatctttttcatccttcttttccagttcccggacgtagcaaagctgggattccgtcaggaaagggctgaataaatccctggtaggctcaaaatccagaatgccggaaaaatacccgtcttcaatatccgcgatacggtagcagatatcgtccgcggcctccatcaggtacgccaggggatggcggcaccagcaaaggtatttttcatccggcgcggaacggggaagcagccccagatggccggccacgaaggaagccgcctccctctcctgttccccgatgccgaacttcttgcattcaagcttgttggctgccgtcatgccgcctttcctgacggccgcggaataggattgcgtgcagggatacttcatgaaggcgcccagaacggccgccgtcagtttcaggccgttgccttccatcggatccccggtgcgggtaaggatgcggaacccctgggaattcccttcaaacggcagctccaggccgtgccgtttcagggcggtttcaatggcgtcctccccggaatggccgaagggcggattgccgatgtcatgggccaggcaggcggtggaaacgatggtggccacgtcggaaggcactataggagcgggaagggaacctttctccgccagccactctcccgccagcatgccgagggaggagccgatgtgggccacctccagactgtgggtcaggcgggtgcgaacgtaatcattgcggcccagggggaaaacctgcgtcttgtcctgaaggcggcggaaagcgctggaaaacagaatgcgcccgtaatcccggtcgtaattgctgcggtttttctgcggagacgccgtactctggtgcctggacccccagcgggcgtccgacaaaagctgctgccaattcatcatccctgacatggtgaaggaatgctacaggggaatgcccggctggaacaggagaaaatgggggaaggcgttcaataggtcagcatcagccccactccccagtgcaggttgttgtcgtaattggtggaaacgctgagatgggaggtcaggatgtagtgcaggcccacggaataatcccggtccgtattcagggaaaaggaaaggcgcaggcgggaggtgagcgggatatcgtccctctccaattgcaggcgcgcctttccgtccgtatcaatgcgcgcatccccaatcaggagcaggggcagcgtataccggacgcccagggtgccgtccacttcccggtcctttttggtggtctggcggaacatgttgcgttctccggcctcacccttgcggcaggtccagtccaccccgatgtaggggtaaagccactgcttctccccgatgtacctgcccagccgtccttccgcctcatagccgcgcgtatccttgtagcctatttgccactctccctgaacgctccagcgggtgcctccgaactccaggtctccgatgttcccgttggaggcgaaatcattgttcacggtcaggtaccacttccggtccatgtcgtaaacgtgctggagcgcccgcatggggtgtggaagctgcggattggggggagaatcctcatacgtgaaaatccggcccatgccgctcatcatgtggtacaggatatggcagtggaaaaaccagttgccgcgcgtcttctccgccgcgttaaactcgatcacctgggtggccatgggctggatatccgccgtgaacttgagcggtgaaaaatccccgtgcctgttcaccagccggaaaaaatggccgtgcaggtgcatgggatgcctcatcatggtattgttggtcaggataatgcgcacattctgcccttccttgatcatgatacggtccgtctctgaaagagtcttcccgttcatgctccacacgtagcggttcatattcccggtcagcatgaaatgcaattccttcacgggcacgccggaaggaaggttggtgcgggaaggggacttcagcatgtcatacgtcagggtggtttcctccccctcctcctgcatgctgccgtggcctccaccatgggaggaaccggacttcatgtccatcatccccatatctccggaatgggaggccggcattccgccggacatgccgtggtgatgcatctggcgcatggaaccggaattcattttcatcatcttcatgttaccgcccatggtcatcattccgttcatctgcttcatcttcttgaagtaattcagcctggggaaggggcgcagcggctgcctttccccatggcccagccacagggaggaagacccggaggtatcctccgccgtcgcctggaactcgaaagccctgcctgattccggtaccgtcaggacgacgtcgtaagtctcggaaaccgcaatcatcatgcggtccacgtccacgggaacgacatccttcccgtcgctggccaccacgcggattttgccgcccgcgtacctcagccagaaataggtggaggaagccccgttgacgatgcgcagcctgaggcggtcgccgcccttcagccggggcagggaagcttgcggagagccgttcagcagaaagcgttcgtaatacacgtcgctcacgtccatggcgttcatgcgcttccattcgctggtcagcttggttcccagatagccggcgcgcagggcctcccagtagctctgcacgctccccttgcggatggaaaaccagtccgacccggtgtgaagcttcctgttcacctcctggggattctcgttcgtccagtcgctcagcaccagcgtatactccggcagggcgtcctccgtcctgcgcgccgggtcgccgggccgcttgcggacgacgaacgcgccgtacaggccgctctgctcctgaagtccgctgtgggaatggtaccagtacgtgccgttctggatgatgggaaaagtataggtatgcgtggtgtggggctttaccggcgcggaagtcaggtacggcaccccgtcctggtcattgggcaccagcaggccgtgccagtggaaggaagtctccgtatccatcaggttgtgcacccgtatcaccgcggtgtctccctccgtaaaatacagaacggggccgggaatgcttccgttgatggtcatggccgggcgcgtgaccccggtaaaattgaccggagcgttccggacgtataaatcgtattccaccgttttggcgaatgacggagagaactgggccatcaggcagcagcacaggaatgggaaaaaatgggaggcgaccttaaacatgaacaggaggaaagtactgccagaaaagacctgttcattccatctccggttcaaaatgaaacggatgtgatgtgtcatgcctttcctggagcatgaaaggagaatctggaaactggcgcgggcggaaatgacaagggtgcgttattccggaatccggccgccggaagcctgtttctgcgcagcctttttgagaggaatgggcgcgatcaggaaagaggacaggataagcaggcacccgagagccaggaggaacatattgggctgttcccggaacaggagcagggaaatcagcgccgccaggggaatcttgagattgttcatgattgccagcttgacgggcgttacccggcgggcgccgtaattccagaggaaaaagcagactcctgaagcgatgactcccaaataggccagcagccaccattgcatggctgaaatctcctgccagcaggccagccctgacggcagtccggcaggcaaggtaaccagcagggcgcctgcgtaggcataggcgaagcaggaagcttcacttccgccgaaccaggaatccttcaaggaaatgtaggcgatttgccctgccgcgaaacaaaggttggaaagctgtaccagaacaattcccgtaagttcgccattgccggcggaataccctttccaaaggatgcccgcgcctcctatggccgcaagaacggccgccgccagatggagcggcggcagcttcttcttcatcaggccgttgaccagaaccacgtaaatcggcgtagtggccgtgaaaagggcgacctggtgggaaggcagataatggaaggctgcgatatagcagaggtacattcctccgaattggacggcgcctatccccatcatccccattgcatggctgaaaggaaccttccggacgaaggggaggaaaacggccagcgagccggccatgcgcgccagcgcgacaaaactggcggggaggtcggacaggcagttccccagcagtccgaatgacaacgcccagatgaaagacgtgatcagcagcgcaggcatgagggcggaagcatacggagaaaggaaaaccaagtcaatgcctgtggcgcaggaacagttgcgaggagaattctttccacatgcaattttatggaaagaaaggatgtgggtacatctgcttcgccaaatagagaaaggacagattttcttggtggatgttttgttttggcaagggagaagaaaaagttggacaacggtatttaataatgaaaataaaaatgttacaaaagttgaaaaaatgattttgagggtatttggacttgaactatttttggtggctttttataaagatgcatgaacttttggccccttgccgttttctctgtatgtgccgtggcatctgtatcgcttgctgcggaaattcctcaggaagttcaggcattggatcgcatatatcagaaacggtgcacccaggcttgcgcccctcatattgctgcttttactcagaaagcgttggtattgcagaagaaatgcgttcaacgctctgattttgaaggggcgaaagtaattcatgacggtcttgaggaattaaagaaaaacaattttgactggcgattggtgaaggaaacttgccagatttctattcctagggatggatggtatggttcggttgctaatatgattcataagctggatgctgagggcaaccattatgatatacaggaattccgtaaaaaatttaaaaacacgggcgagaaagttaacaccgaactgacgggaccggatctgatcgtatttacaggagctccgaacaggttgtggctgatcattgattcccggacgatttttgaaatttatacaaacaatatcgttgcccgtttgatacatgattcttccaaagagggaaccaatgtaggaagtgcggatgaaataaaagatgccgagtggctgcagatgcagaacgatctcaagaagcggtgttttcaggcatgttcggaaataacaaaaaaatatatccaggcgttagacaagttgaagctgaaattatcggctgacggtgatatgacagctgctgttgcagtgcatgaatacgcaaaacggcttgaaagcggcaacctttctccagaacgggaccgttccttgaaaacctttgaaggaaactggaaggatggttccggtctgacttaccgttttaatgggcgtggagaaggtacagttaaaaagtctaacggtactactgattttacgatgactcctgtccgttcttctccccacggggatttccattattttaatgtttcttccggaggctctcggattgcaacccgggtggccgacaaggtttatattatcatgcaggatggaagaagggattggctgcgcgtgtgtaaacgtatcgggaaataacattgagaaaatacatggaacccagccgaactgcagaactgagtgcaacatcgttgaaggcatctcgaaattgagcctgaaggttcgttcttatactgcttttctaggtggatgcaccctcccgtgccaggcagacggcaaatcatcatccgggtgcagggaagcatcggttttatcttttcgctatcagccttctgttatccgctaaaataaagcctggcggggaaaagaaaaacgctccggaatgcaggattccggaacgtttatgaagatggtacgcggtactggtttcgaaccagtgaccccatgcgtgtgaagcatgtgctctaccactgagctaaccgcgcatttgcagtgcggggggaatatatcgttcatgcaggggattggcaaggagttttttgaaggcaggtgaaaaagagggaatactttccttccgtcaagattcccggattcattcctcctgactgatgtgcggctttgtccggattccgttccggaaagtgggaaggtggctcaattccggcttgtacagcatcaaccgtcttcctacactccgggcatgagttgcacaagccctcccagagcatgggcccaggttgataccaatgcgttgaggcacaatttgaacgtcgtccgccgcgtgatgccggaccacggcctgatggccattgtgaaggcggaggcctacgggcacggactggaaggggtagtgaaggctctggatggtgaagactgcgattttttcggggtcgccacggtggcggaggctggccgggtgagggatgctggggtgaagacatgcccgttcattctcggtccctgttttgccggagaacgggaggagattgtgcagaacggctggcgcgccgccctttccagcatggaggaggcggaacatttcaactccctgggcgccctttacaacaagcccgtccatgtccatctgggcgtggataccgggatgggccgcagcggctttcttcccagtgaactgcacggcctgacggaaaagctcaagcagttcagccatctggacctggagggcgtgttttcccacctgtccgcagcttccgacgatatttcctttacgcatgggcagatcagcggctttgcggaggccgtgaacgaactctcccaggggcaccagtacaagttccggcacctgtgcagcagcgcggccgtgttcaattacaaggttccctgcgccaacatggtgaggctgggcagaatcctgtacgggtattctccgatgccttccccatacaacaaggagctgcggcccacgatgaccctgtacagccgcattaccctgatacgcacgctgccgggcaaccatggcgtttcctacaaccactgctatatgacgaaggggagcacgaaggtggctaccatcggcatcggctatgcggacggctacctccagtatctttccaaccagggcgcacgcgtgtatatcaacggccagtactgcccggttctgggccgtgtgacgatggaccagattatggtggacgtcacctacatggaccaggtggagaccggggacctggtggagatcatgggccctaatgtaagctgggaggagctgacgcgccgcgccagtaccattcccagcaacgtgctgaccagcatcagcgcccgcgtgccgcggatttacgtgtaaggggccgcgggctgtttcgcgctcgtttgtttttttgacgggatggcaggcaccgaagccgcaaagctgcggtgaaccggtgtttccgctatcgcctttaaaggcggtgactcttccgggagtgagggagttgttcccctcatgggtgtttttcctaagcggaacagaggcttttgttggggtatgctgtccgcaggctggagaaaatttccttggctgcgctctggatggatttttagttatgaagggcggggaggccgtcatccccaggctgccggaaccgtaaattcatggttaatcagcatttccgccatacctcttggcagccggaattttcttgaaatgggaggttttacttctgggagcgccttttccaataggtaacggatgcgacgtttttccgcgcttttaccgctggcgcactttgttccagtcctccggctccagggagcaggggtccggggctacccagtggcccggttctatttccacgggggtgagatccgcacccaccgtttccggataggaggggtgctggatgcggtggccgaaggcggagccgagcggcgggttgatgggggagggaacgtcccccggcagaggctggtgcttattggctctggcgggatccggttccgggatggcgtccagcagcgccttggtataggcgtgtttgggggattggtagatggtttccgcatctgacatttccacgatttttcccaggtacatgaccgccacgcggtcggagatgtgcttgaccaccgccaggtcatgggcgatgaagaggtaggagagcttgcgttcctcctggagttccagcagcaggttgagcacctgggactggacggatacgtccagcgcagagacgggttcatccagaatgatgaggctggggttcagcgtcagggcgcgtgcgatgccgatgcgctggcgctggcccccggagaattcaaaggggaagcggtcgatggcgctgtccggcatgcctacgcggtccagcaggccgcgcacccattcccggcgcgcggcgggtgtgcccatgcggtggatgacgaagggctccgctacaatctggccgatggattggcgctggttgagggattccgccgggtcctggaagaccatttgaatatgggggcgcaggggccgcattttgcgctgggagagcgtggcgatgttttttccgttgaactggatggagcctccggtgggtttcagcaggcggacgatgcttttcccgatggtggattttccgcagccggattcccccaccagtcccagcgtttcaccggggtagatgctgaaggagacgtcgtccaccgccttgacccatcccgcctgccgcaggaagattcctgagcggacgggaaagtacattttcaggttgttgacttgcaagagtggttccggcatggctgggagaaaaaggaggttagaggtttgcgcatcgggggcaggcttccacgaagtggtccggggatatttccacgagaggcggccgttccgtgagttcttccacgggcactccctggcgctggcagaagcggcaaccgggcacaaagtctgcaatggaggccacctgtccgggaatggtgggcagcttggtcttgcgcacggagctcaactgcgggatggaggccagcagtcccttggtgtaggcgtggcggggattggcaaagagttcccggacgggagctttttccaccacgcggccggcgtacatgactactacggagtcacagctctgcgcaatgacgcccagatcatgcgtgatgaggatggaggaggagcccatttccgcctggaggtccttgaggagggacagaatctgcgcctgcacggtgacgtccagggccgtggtgggttcatccgcgatgatgagttccggatggcaggccagagcaatggcgatgacgacgcgctggcgcatgccgccggagagctggtgggggaattcgtccacgcgctgttccggcgcgggaatgcggacgcgctgcaggagctggatggcggcatcacgggcttccctggcgttcattccccggtggagcatcagggattcccctatctgcctgccgatgctgtgcacggggttgagcgccgtcatcggttcctggaagatgacgccgatgtggcggccgcggatgccgtgcatgtccgtctccttcgcctggaccaggtcacggcccttgaacaggatttgcccgtccaggattttccccatgggctggggaagcaggcggacgatggacatggccgtgacgcttttgccgcagccggattcccccacgatgcctacgcaggttcccttgggaacggtgaagctgacgccgtccaccgctttcagcaggccggattccgtctcgaatccggtgaccaggttcttgatttccaacaggggttcgctcatttgttatttctccgtggcagagggttccagcgggccgccgttttccgggatgacgggaacggacggcagcttgccgccgccttccttgttgtccaggctgtcgatggagtccatatagcggtactggtcgtatacggtgtccacttcctcgaaggtttttcctttccgcttggcttccatggtttccttcttgacgtcgttgtccacccagtacaggtagctttccatcgggtcaaacacgaccggatggcagaattgcgtggtggcgctgttcggccatttgacccagcgccagtagcccagcctgacgaattccgtggtccagcaggggacccacagggcctcgtcatgaattttctgctgcaccttccacgtggccttttgaagctcgtcttccgtagcggcgttcgtttcgtcgtccagcagcttgtccatctccttgtccgcataggcgcagatgttgttggtgtaggtgatgaggctgccgcgttcgtcataggcgtagcgggagtggaagccctgctcgttcatcgggtggggcggggtgaagccccaggccatgaaggaggcctggacgcgcttttccatgatcttgcggaaggccacggtggagtccagcgggtccagctggatttccaggccgcacttgcgggcgtcttccttcagcttgcccagcgtggaggccagggagggggaggaattggggaaggtgatggcggcggttagccgggtgccgtccggcttgcggaggattccgtccgggcacgggatggtgtatccggccttggcgaagcaggcgcgggcctgttccggagagtaggggcgcgccttgatgtaggggttggtgaatttgccgaagccggagttgtaggagttgagccgctggtagtctccgcggaaggtgatgtcaatgatgttctggatgttcagcgcatgctggaagcccaggcgcacgttgaggtcgttgaagggggccttggaagtgttcaggaagaggccgtacggaggccgggggtaaatggtgaaaaacgtgctgcggttgatatagccgttgtggacttccgggatttccatgcgctcatgccacagctccggcttcgtgatgttcagcacgtccagctccccgatgcggaagagttcaatggccttggacggttccgcgatgaagttgtacacgatctggtccacgttatacatgtacttcgtgaatttcttgtccctggcccaccagtccggcacgcgctggagcgttacctggcggccgcggatgatgccgtccggcttcaccacgtaggcgcccgtggtgggcggtacgcgccactggtagcgttccacgtagctggggccgaattcgcagtagaagtgcggcggggaagggatgaacagcgtgcagtagaacgggagcagcggcttggcgaaggggagggtgatggagaagcggttgtcgtcgtagatggtgatgttggacgcgttctggtagaagaagttgttgtagaagacgtcccggctgtattccgaggtgcggatgtacatgttcaccagcaggtcgatggcctttaccttggctccgtccgagtagcgggcgtccgggtccagttcaaagtaaacggtgcgcctgtctgcggattccgcccatttatgggcgatgccgggaatgattttcccggtgaccggatggatggagacgaggcctatgatgatttcatcatacagggggccgcggaagccgctgttgctgttcgggccgttggggcggaatgtgtccgggtaggaccccggagcccattggcgcagcacgccgccttttttggcgttcgggtcgcctatttccggattgtccagcccgtcttcccatttcaggtcctgggggatgtccgccggagtcttgaatttgatgtagtccccttccgtctgcctgcggtggatgacggacagggccgcttcatcagcaatgagcttgctttgcagcttttccctgattttggggtcttcctccttgaagaatttgtcccggagttcccgtatttccttctgcttggcggcttcttcccgcgccagccggtcattgatctgcttgttccaccgttccgggaaggagtcaaagcccggagggagcgtgccgaagggcacgttcggctgccagcccaccccctgggattgggaggaatccttgcaaccggaaccaactgccagcagaagggacagcgtcacggaggaaaggatggtgcggaggatggcggacagcttgagcatgggtatggcggaaacaggagtctttttatttataggtggtgaatttcttgggatcgaaggcttcccggatggcctccccgatgaaggtgacgagcaggagggtaatcaccagggcggagaaggcggaggtgaccacccagctggcggagaggtccgccaggccgtcattgagcaggcgcccccagctggcgtacgtgtccggaaggccgaagcccaggtaatccagggaggccagggccagaatgagggcggagacgctgaacggaaccagcgtgaccaggatggcgacgaggttggggaggatgtggacgaagaggatgcggctggtggaagcccccagcacgcgggccgccgccacgtagtcgcgcgccttttccttcatggtggaggtcctgagctggtaggtcatggacatccacccgaacatgatgagcaggctgatgatcaggaacatgcccttcatctggagcggcaccatgtctgaaatgatcatgatgatgaacaggaagggaacctgggagaagatttcaatgaggcgctgcatgccgaggtcaaacatgccgccgaagtagcccatcatcatcccgaaggtgatgccgatgaagtacacgatgggaaggtagaagatggcggctttcatgttcacctggagccctccgtacaggtacgccaggatgtccgcgccctgggtgttggtgcccagcaggtggcctcccttgaggggtggggccgggtggtagaagatgcggctgattttgttctcgtccgtctgtttcaggaagtcctccttggtgccggggccgctgtagtgttccgctacgatctggttgttttcatacgtggcgctgtacacttccgtccggtcttccagccagccggtggcgcggtccacctttttccccttgcggaatttgtagctgatgtggggaagggcttcttcatccttgtgcagccgggaggccaagccggaatacggcttgccgctggactcgcagaccaggccgtcttcattcaccgtcagggcttcagaaccgggattggtggaatcccccgtggggtcgtacggcaccaggggcatgatgacgagggagggttttcccggctgccctgcctgttttttcagttcgcggtagttggcttccgcatccgcaaagtccccggtctggccgaaggtggagcctttgtaaaccttgcgcatgatggcggggaagtaccaggagccgtcctgcacgacgagcagcgcccgtttgcccaccaggcactggtccatgcaggccagcagcgtcagtacgagcaggatgatgagggagacatagccgcgggagatgcttttaaagcgctggatgcggcgtttcgtaatcggcgtgggatggaagcggcgcggccctttcagcatgatccagaagccgaccccggccatgaccagcacgcaggcccagccgaaccacaggaattttccctgcggcgtcaggatgccgccgttgttctggtccgtgcagacgatgttgagcatgctcatttcacgcgagacggtgaagggccagctcaacgtgggcaggagcaggccgcacaactctcccacggcagtgaggaccgccagaatgaccagaaggtatgccagttttctaaccatgtgtgttattcaaatttaatgcgcggatccacggcggctacgatgatgtctgaaagcaggttgcccagcaccatcaggaaggaggtaagcagcagcgtgcccatgatcagggcgtagtccttgtccatcagggcctggtagctcagcatcccgaagccctggatatcgaagaccttttccaccagcatggagccggccacaataaggctgatgaggctgcccagcgtggaggcaatcgggatgaaggagttgcggaaggcgtgcttgataacggcccccttgaagctcacgcccttggccatggccgttctgatatagtccgcggaaaggttgtccatcaggttgtttttcatcatcatggtggtgatggcgaaggagctgactacataacagatcaggggaagcaccgtatggtgcagcaggtctccggcctgttgccagaagcccatgtccgcaaagtccggagacgtaagcccgcagagcgggaaccattccagacgcgcgcccagatacaccaccagcacggcgcccagcgcaaagccgggcacggagtaccccaggaaaatcagaacagaggagatgttgtccaccaggctcttgtggcggatggcctttattactcccaggggaatgcagacggaataggtaataatggcgctcaggatgccgaagtacagggagacgggaatgcgctccttaatcatgtcccacactggttcattgtatttgaaggagttgcccatggtgccctggagcagcccgtcaaagctggtcttatacatcacggcgcgccaggcatagccgcgcgccttgtccctgacggcttccgtattgtccgtctgcctcatgcggcgcgcccagcgttccgcgcggtccatgggggattctatgtccacggtccagccttccgaggcggctttccgggacggagtgccggaaaagaaggcgtccttcacgctgtcggaatccttgtcctggcgcactacgacgacctgttctcccgtttcattcaggttgatccgggtgtgcgtatcggaaatgccggaatattcatcttccttgtccgccgcttccacgccgccgatctccccgaattcctcacgggaaatgaaaatcttttttgggagcactcccagccattgcagataagcggtgatgatgggctcctgaaggctgtactgttcctccaggcgctccatatccgcttcgctcaggttattgtcgccgcgctgggaccccgccttctggccggacagggcgctcatgctctgctgctgcatcatctgctcaatgggacctcccggaacaaagcgggttatgcaaaagacgaggaacgtgacccccagcagcgtcaggggcatgagaaggagtcgtctgatgatataggtcttcattcgtcgcgcagaactctactggtttgtggcaggcgaggcaagtagcaatgcaaatttgtgagcctttgctaacatgcggtttccccattttttcttaatgcggaatggaaacaattaaagattccgcaggatttcaatggagcatcccgtattaccgtcaacggttcgcaaaacattaaatgccttctcccaggcggcgcgccagcatctccgggagtccggcggccagaatgcgcctttgcgcttcctccacgtcgtattccacgcggcgctggtaataaaccatgctgtccacatcaagcacgccgtaggcggcgcgggggtctccgtccctgggctggccgacggaacccacgttaataaggtacttgttggttttgagaagctggatgtccccggattcatattcctggatgctcccttcatggcggatgaaggtgcgggggacgtgcgtatgaccgttgaagcacaggaactgattgtctcgcaacatgttgatgctgtgcgtggccgtgtccacattcgtgacgtaggaccaggaattgggcttgtcctgggtggcgtgcaccagaacgatttcattgggcaggatacgctggaagggggcgcggcgaagccacttcttctgttcttcggaaagctgctggcgcgtccatatcagggctttgtacgccacggggttcatgcccgccggattgtcttccccaatggcttcctcatcatggttgccgcgcacggtgggaatctggcgtccgcggacgaactcaaggcattcggccggattggcgttgtagcccacaatatcacccaggcagtaaacggcgtcgcattgaagctgttctatatccttcatcaccgcttccagagcgggcagattggcatggatgtcactgatcagggctattctactcatggtgttgtggagaaaaagcatagcacctttccggggcgttgccaagcgccttcggcggagcggttaaagattaaaggccggaaattaaagttcattccggccgtcattgaaaaagcgcccctttaaaggaggagctccttttaatttatctttagtcttttgtttttagtcatccgtttttgcgggaggcaaggcctccaaggcctccctcaagccgtccacggggtatttcagggaattggccaggtggctgctcatcaggtcgcgggcaatctcgtccgtcgggaacaattcccggaagggaacgcggtctttttcaggcactttcagcctgttttccaggacgaaaatattgctcaccaggctgggcgtccggttcctgggatccttgaacaattcccggcccagctccagcgcctcgcgggatttggagggaacgcggacaagcgcataaaactccttgcgcgccgtcaggggcggcgctcccagttcccgggccttgcggtaggcttccgcagccttttcaaaatccggctggcggtaggtatcgctgtacatgttgcccagcagggattgcaggtaccagctgtccgggttggcgctgatgcctttttccaggaagctgcggcccttctggatgtacttccggaagccttcccttcgttccatgggagaaagccgcttattgtccagatagctggaggaggcgttattgcccaaatgccacgaaccgttgtcccagtaaaagtcggaatggggggcaagagaggtgatttggttgtagcggcgttccagattggcccagtcggaaatcaggaagcagtcgaaggcctccatgctcagcacggccgctaccagggagcgcagcccccccagggaaaccatggcgagctgctgttccagataatcggaggaggagagctccaccggatcatccagcagccccgccgccttttcctgctccagaatacggttctgcaaaggcaggcgaatcatgccgaagcccagcagggcaatgatgaaaatgacgatggttttcagcatgatgttacaaaaagtggtgaggctctttaccccagagaaagattctctagaattctcatagctccttcattcctattttctttagataataatagataccatcataaaaggaggattgccgagtcaaatccgcgtcacatccctccgggataaaaatcacgaatccctggcgtgctcgtgtcaataagacgcggtaggtatttttaagatagagctgtgcgtcttttttacaaaccgttttccaactagaacctgtaaaattataagctttaaaatgtcctttttctatgcggtagtctgcatcccatgcaacgattgcccagtcaatttctagcccttgaatatcaaattcggtggccgtgtcttcgaggaaataggaggaacgaatatcctccttatcatttaaaaaccagttttctgcttgaatattactctgtacccagattccaaattggcgtaaacgtttggccccagagctagcgatgagtccataacgttccgttcctcgggcttgggctcgtatccattcttgggctttttccaggctgcgggtaatcgtgatgggataattaggcgatagctcagagtagagctgttgggctactggtaaattttcgtccaataatgattttacaaacgcagaaactcgttcattccggaaagaacggagtgaaactgaaagatggaggtttggttcccgatagaggcgtaatcccgtaaagagatgttcaagttgttttccgtgtgtatattccacatcagagatttggggtgatacataaacattccaatctggaaaatggtctcttagtgcgtcaaaccaagctagcagccctgcttctccagtatgtatctcttgaccacctccgattaagcagatgataaccgtccaatcttggtggcgatccattacactgataagaaattcaggttcagacatgttccagccgggaacatggcgttttaacataaatttggctgtttgttcttttgtccaagcacgttgtgcttcgtcaaaaatggctactttctccgcagggatttgttctgaaggaggcagataagcatcacgaaagtggtggatgttttggataaaggcagcaacttttcttttagatgctgtctttgttattttacctttaaaacgtttgatttcatctcgtgctagagcttctcgtaagacagcaaccaaaggaccattaccggaaagaaagaccgcatgttcttgctcatcatattgatgccgctcatttgcaatattgaggcctactaacgtttttccagcaccaggtacgccagtgacaaagcaaatggatttttcatgatgctgcttactctgctcaataatgcgattcagtgcctttgtggtgaggctaagattgtaagctccggcatcactacgtgaaatttctttaacatcatgtccacggtaaagtgcttgagctgcttcaataatcgtgggagtaggcatgtatgatgaagttaaccattgttcaaaatggaatgcctcatcacacagagtgctagtcagctttgttaaagtaggtcctaaggtgttatcattacagaggataggatgataaactccgtcttgacctactgtaagttgatgttccttagaaggagcatgggtacaaattaccaaaggaacaattttcttttgatggctttcttgatggaaatactttaaagctagtgcatagtctacaacctggtcaatagcatgtctgggataagatgattctcctactttaaattcaaggacatagagaatacctgcacaggcgatgacgacatctattcgttctccgatgcggggaatggtgtattcaaaggctattgagccagcaggaatatctttaagaacgtgttggagtgatttgatttcgtgaacaaaggagttgcgcgaattttgatctaggtcaaatggtgtatgaaaagcaatctgccctaaaatttcttttagagattgggtacaaaaagactgtaggtcattggaataataagaccgttgcatcatctttggtagtaggacagaaccagaatggtcaatccatgttcaggcacttgcggatgtccttatccagaagttcccattccggcacggatgttccggcctgccgggccttggagagagggtctccccagatggccgtgtattcgacagggcgtccttcgttgtagtccacggcgctggacggaatgaaggagcccatgctttccgtgcgggaaaggtggaattccaccaggtcatccggcagggtgtagccgcgggccttcgccgcccggactacttcctccatgatgcggcgcgcccgggcgacgttttccgggttttgatagagttccgcaatgctgatgccgcccagcgccaggcacagcccgttgaacgggatgttccagacgagcttgtaccactggatttgctccgcggcgtcaaaggcgcgcgtcttgatgccggcgttggcaaacaattcggagagttcccgggccttttcagagccttccggtgaggggacgaagggtgcaaattgaatgttgccgccttccagatggttgacgtggcccggttccgcgcgcatggcgcagatgaagcacagacccacatagatgcggtcagccgggatgatgcgggcgatttcctccgcatttcccatgccgttctggagtgtgactacaaccgtatccggtcccatcaacggaggaagggccttggagaaaccggcatttgccgtgcttttccaagcgactatgacgaggtccaccgggccgacttccgccgcgtcccggtacaccttgagccggggcagggatatgtctccatgcaggcttttcacttgcaggccgtgttctttcaggtagccgtattccgaacgtacgatgaaggagacgtcctggccggattcctgaagcctggctccgtagtagcagccgagggctccggctcccagaatggcgattttcatgatgtgcggtgaaggtgtgtatcttgtattgagattgcctagaggccctgaacgttgcccttgttgtccagatagatgtgcatggcgttcggtgagacgggcagggccggcatgcgcatgatttcaccgcagagggccaccaggaagccggctccgttggcaatttcaaagtcgcgcacggtgacggtgaaaccggtggggcggccgcggagacggccgttgtcggaaagggagttctgggtttttgccatgcagatgggcaggtccgtgaggcggctggcttcaaactgggccagcttctttttggccgcgggcgtcagttccactccgtccgctccgtaaatactgcgggcgatgatgttgagcttttcttccaccggaagagcggattcatagaggggcttgaaaggagcggagggcttgtccgcagcttgcaccaccatttgggccaggtttttgccgccttcccctccctgggagaagatgtccgcaatggcgcagggaatgccgcgttccgcacagtgcgccacgatggcgtccagttcctcctgggagtcgtcaaagaatttgttgacggccaccaccacggggcgcttgtagtgggcggcggcgtccagatgggcgtccaggttggcaagaccttttttcagtgcggccacgtccgtgtttttcaggtccgctagggcggtgcctccgtgcattttcagggcgcgcgccgtggctacgatgacgatggcggcagggtccagtccggattggcggcacttgatgtccaggaatttttctgcgcccaggtcaaacgcgaatccggcttccgtgacggcatagtccccaaagtggagggccattttggtggccagcacggagttgcagccgtgggcgatgttggcgaacgggccgccgtgcaggaagcagggcaccccttccacggtctggaccaggttgggcatcagggcgtctttcagaagggccatgacggagccggtgatgccgagttccctggcgaatacgggcttgtcgtccgtcgtgaaaccgatcacgatgcggttgatgcggtcttccatgtccttgtaggaggtagcgaggcaaaggcacgccatgatttccgaagccggagtgatgtcgaaacccgtttcacgcgggaagccctgcttgttgagtcccacgatgatggagcgcagggagcggtcattcatgtccatgacgcgcttccacgtgactttgcgttcgtcaatgttcagcgtgtggaagaacatggcgttgtcaatgatggcgctgatcaggttgtgggcggacgtgatggcatggaagtctcccgtgaagtgcatgttgatttcatcaggcggcgtcagggagcttttaccgccgccggtggcaccgcccttgcggccgaataccgggcccatggagggctgccgaagcgccaggcaggcttttttaccgatggcctgcaacccctgcgccagaccgatggagacggtggttttcccttctccggaaggggtgggcgtgatggcggaaaccagaatgagtttgccgggtgcggccggcttgtccagtacgtccagggaaatcttggccttgttgcggccgaaggggatcacgtcgttttcatcgacgcccagcttgttgacacaatcggagaatgcaggtgtgaccatgaatgcatgatgacggaagccccctctttttgcaagaaggttcatgggcattcatgtggcggaaacggggatgttttcaaccatcatgggagtgggcccagggaaatcctgggttcaaggagggtacaggcagagggtgcgcgggagagggaaaattgggcggtgagggcaccgttgtttttcaaaccgtgggagcgtgtccttccactatgttttctaatgaaagcgttccgggaatgagggcctctggaccttataaaaatttcccttgaaaccagggtatttcaggaaagaagccgatttgaagggttaccgcttcagcacagggcggtaatggcccgtgatggtatgggagaagaggaagtcttcctcctgcgcaccgcagccgacgttgtgaataatcagcggcgttccttccttcgtcttccggtcggaaacgatgccgatgtggggaacactgtcggacaggttccacgtaaccaggtcgccgggcttgtagtccgccgcggtttccgtaatgggaagggaccatcctttccgggcaaagaaggcgcggagattgggaaccctgcggtggtcaatgctgcggtccgtggttttcaggccccatagtttcggatatttggagaagtgggccttcatgtcttcatgcacggctttctggaggtccagtccgaaagccctcatggctcggatgaccacgtccgtacatactcccgtttccttggggacatccccgttggggtaggggatgatttgatagcctccgttgtaggagaccgttactcctatctgttcgcgcgccttggcggccagtgcggcgttgtccgccatcaggcacgcggaacaggaaaggaagaggaaggtgagaaggacggcgggtttcatggggtagttgggctgggaaaagggtaaaaatcagacgaagctggcaaagccgatgtccggacggcgctgcatgccgtcaaatttgacctttttggtttcgttgtgggcacgctggcgcgcttcggaaagggattccccctgcgccacgacggccagcacgcggccgccgttggtttcataacagtttttgtccgcattccatttggtgccggcgtggtaaacggaggcattcgcaacgtcgtccagcccctggatggcgtcgccggagcgggaggtttccggatatcccttggaggccagcacgcagcagacgctccagccgttttggaaggagatttcttccggagtgaattctcccttggccccatgcaggcagaaggaggccagatccccggagagcaggggcatgacggcctggcattccggatccccgaagcggcagttgtattcaatcaccttggggccgttcggggtcagcatcaggccgaagtacaggaagccgcggtagggcagtccgtcctttttcagtccggctaccgtcggggccacgatttccttttcaatgcgttccagcatgtccggctccacaagctggcgggaggccaccgcgcccatgccgcccgtgttggggcccgcgtcgccttccttgaggcgtttgtagtcccgcgccgggcacaggatgaggtagtggtcgtccaccagggctccgaagatggagacttccggcccggtcaggaattcttccaccagcaggcgcccttcaccgaagcgcctgtccgtaaatacttctttcaggaaagcgtccgcttcttccttgctcatgcagacggccacgcccttgccggcggccaggccgtcaaatttgagcacggtggggtaaacgccgccgatgaattgccgggcttcctccagggtggcggccacacgggcctgcccggtggggatgtggtggcggagcaggaattccttggcaaattccttgctggcttccagctgggcgctttccttcaccggcccccagcagggaatgcccacgcgggcacaggcgttcgccaggccttcatccttcaccagatagctttcctccccggctacgcagaggtccactttattggaaaccatccagtcgatcagcgtaggcagatccctggcgggaatgggggctgccagacggttgatggcgtcactccccgggaaacagtacatttccggtgcggagggagattccttgagcgccttgaccagtgcgtgttcacgcccaccttttccaataacggctattttcatacgcggcaagtatgccgggacggactgattttgccaagctgaaatgaacggggaaggcactcccggcatacggttttttccgtgctgctccaaggggctttcatgattcaggggacggctgtggaacgtctgcgtgcccctgggcggtgttttgcttccgcgggaatcccggccatgaaaaagaccgcctgacacggaggaaaggcggcctgtgaaaagaagttgtttgtcctggctttagaacgggatttcgtcgtccatgtctccaaagtcgctggacggctggttggagggaggcatggggggcggattgtagttctgggccggacgggcctgcccgtagttgttggagcggggagctccctggggctgctggcgcggagcgccgcccatgtcgccttcaccgccgcgggggaagagctggatgttttcaccgatcacgcgcagcttggtgcgcttctgtccggaggccttgtcttcccaggagtccagttgcaggcgtccttccacaaagactccgcggcccttgctgaggtagttgccggctacttccgcctggcggttccagagggtgacgtccacaaaggtggtttcctcctggcgttcgctgttgtcacccgcatagtagcggttgatggcgaggcggatgtccgtgacggcggtgcctttgggggtgtagcgaagctcgggatcggcggtcaggttgcccattaagaagactttgttgagattggccatatggggtgggtgttaacgaggtgtgtggtaacgtataagaaaggtgccttgccgtttgggaggcgtgtggctggtcgctagcaactatggccctgcacgtgattttgtgcaatactaaattgcggaatcgttcttcatcatgtctcctttctacattgcattcgtcatggaaccgtgaaaacttcacctccatgagtttcaagcaacggcggcgaaacggactgttccgggtttcctggagcatgtgccttttgctgtccgtgctggcgcacctgttcctgctggcgggaagctacctggttccggaggaatggctggcttccccgcgcccggcggaagcggcgcggcgacaggtggtggtgagcgcgcgcatggtgaagaaggtggagcctcacccggagggccggaggcaggcgccgaaggagcatctgcctgccatcgtgaagactaatgaggagcaggaaagcgccaccaggccggagacccccaaattccagagcaacaggaacacgcgtgcggaaggcggccgaaaggacccggacagcagcagggacatgcctgcccaggacggcgtggagcgcgagaatggggagattgtcctttttgaccagaataggcaggatggcgacctgagccatgaacgggacggcaacaagaatgccgctcccggagcggccgccaacgttccctatcagcccctggagccgtccatgcctcccgcgggccatccggattccgtagaccattctcccaacagggagggcgttccgggcaaggcaagcgaggaaggactggcccggcagaaccgccgccccgcgcaggaaagggccatgcagcttccgcatgcggtgacattgccccggcccggcgaaccggagaagccggacgccctccaggaactggccaagagcattgcgaagggggcggacaatcctcccctcaatcttcccaacctgaacctgcctcccaatacgaggccggcgcagaagcaacctttatacgaccccatgtttaacgcggagagccagcccggcttcaagacgcatgagcagaaaaccaagcagacgggcaaattcagctttggccgccgcccgacactggatgtggaagccacccccatggggacgtaccaggcgatcgtttaccgggccatcggggagcagtggtaccgtcagtgtgacttgaaccgcgacctgattgtcaccggaaccgtgcgcatccgcatcctgattaacaagaacggcaaggtttcctccatgaggcagacttcccgcgtgggagccagcgaggtccagaagtccttcaccttcctcgccattaaacttgcccggctgcccgcgatgccgccggaggtgaggaacgcgctcgtcggggattcgctggaaatgtacttcgacttcaatttttaacaacctaccatcctacaacaacatcattcactgatacttcaccatgaactttatcaaggactgcatcacattcttccaggcaggcggcgtcttcatgtatccgctggcggcctgttccgttcttctcattgcggccatcatttaccgcatgttcaatatgaagaggagcaccatctgtcccgccaggctgacccgggccgtggagcagtacacccgcggggccttggagcgcagcgaactggagaggatggccgcggattcgggttccgtggaggggcgcctggtgctggacgccctgaattctcctctggaggatgaagccgccctgaaggagatgatccaggtgaaggcccgcgaggagttcgtgacgctccaggcggggcttcccctgctggacatgattgtgatgatcgcccccatgttcggtattctggggactgccagcggcctggtgcagattttcagcgttttcgggatggatgagagccacggcatgatcgcgcaggggattgcccaggcgctgaacaccacgattgccgggctggccatcgccactcccgccgtaatcgcccacgtttattattcccgcaagctggagcgcatttccgcttccatggaagtcctgctgacggagctgatttccttccgctgccatcattcccaacgctgaacaggccatgcagttttaccgcaagaaagcaagaaccatgggggttcccatcgtccccatgattgacatattgaccattctgctcatctttttcatcgttcacacccagtggaaaaagccgcagtccctactgaaaatagacgtgccgggcgcggagttcatggaaggggctccttccacggagcaacgggccgtcctggccgtgacggggaaatcctccatttccctgaacgggaacctggtggagatgaatgagctggccgccgccctggaagccctgaaaaaggagaaaccggacgtcaaattgcagcttgacgtagataaaaaggcggagtttggcgtcattgtcggcatttgggacgcgctgacgtctgtgggtattgacgcgggggatgttcctgccagaatagaaatcaacaaagccggcgcacagtaagcgccttaacacatatatactcccctccctcccgatgctattggaaatcgcacagtatggaaatccggtattgaaggaaaaatgccgccccgtagaacattttgacgacggcttgaaagccctggcggaaaacatgctggaaaccatgtacgccgcagaaggcatcggcctggcggctccgcaggtgagcattcccattcaactggtggtgattgatattccggaggaggaagagtccgtcacctggctgaaggtgaacggggaggagaaggagctttcagacatcatgcccctgatgtttgccaatcccgtcctggagccttacgggcccatgcatcccttccatgaaggctgcttgagcgtgctcaagatacgcgcttccgtcgtgaggccggattttgtcaaagctacggtgctcctgatagatggaagagaagtgacgattgactgcaacggattgctggcgcgatgcctgcagcatgaatgcgaccatttgaacggcatcctgtttgtggagcgcgtttcttccgcccagaagatcaccctgcgcaataaattgaagcgcctggctaccgggtattgacggtttcccggatcgggatcgggccgcctgtttggcgaaaggtctcggcggcaggggaaatcactcttgagctgccgcgataaagcgcggggttagccggtctgttgcatcgtgaggcataatgggctgtgaaatttctggactgggtttctttctgcacgtgcctgaatccctctccatgaactttattttactccgcatctgctcaaggagtccattggggcgcgcagaaaatcttgatccccttttcttcaaatagagtgatgattcctcatggttccgctgtttggttttctgcggtgcagagaagggaggagtatcttcctccttccagcttcccgatcatgccaggtctttcgtttggccgttgaggtacatgggcagagaggggggtgcagaggcattgcgaaccagtcgtcctctttcttctactaatgattagggccggtcatcaacaaacgtcgctgtcagacgaagatgaaagttcagtcctgttcctgtggggcttccaaagaagtatgaccaatgcctggagcagaagggagaccatgttaaaaatgaagattgcaggaaaggagccgggaaggagaagcgtcacaaggatgttgaacaggcttccgcagaatagaaacctgccgcccagtcgctgaacacttacccatgcttcattactactgaaggcgtaaggggtgcgtattccgaaccatttgttgggagttatcttggggcaaacgttggccaggagcagaagaaatgtgttcaggcttatgaagatgactttggctgtgtctcccaggctgaccgtatttgccaggcttgtcttttgaatggtcaggcaaagataggaaaacaggacgaccaggaagaattccgcgtacgtggccatcttcgcgccaatccgcctgttgttttcattcctgctgaagtgaatgggcaaaaggatgatcagacggagaatcttcccgatgaggaagccgaggattcccaggccaatgaatcccagaagggcgtccatgccgttcttgtcctcaaaacgggtgggcatgccgtattcattgaaatgtacggcgacgcgggcgggcagccgtgacgatacggctgcatagtaagtcagcacgggaaacagggctatgacaagttcgttgaaaattggcccgatccaccaggatggggaagattgagcagagagcggggttggctgcatggcgtttaatgattgggctggggtccgatgattttgttccattttccggaggatgtttcgcgggccgccttgaaattgcctatccagaccagtatttcttgaagaacgctcaggttgatatcgtaaaagatgaatttgccttccctgtggtcgcggacgagatcggcttcttttaaaacagacaggtggtgggagatagcggctccggtaatactgaaatgttccgcgatttctccggccggcatggcgccgtttttaagtatttccagaatttcacggcgtgtggggtcagccagggctctgagcgtaggttgcagggaagagggattattcattttatatttaactttaatgttaaatatttctaatatggattcccggcgaggtcaacaaaaataaagagaaggaccgaacgggaacacttgtttatcacgttcctgcgtgtcgtgatagccgctctggtgggatcattctttaaaccggaccgccgtccgctatccggatatggattccaaggatttagtctaaagctttcccgcgccgcaagcttttgcagcaaactgaatcatttgtgcggatggagaacgtacggtggggaggagcgttcgctgacgcttccagtttcagatcgaatgttgcaaatgctcgctgcgttccaaggggagcttcaggaggctgccgcagggaccggagcgttctgtgattcccttttgacgcggatttgcaggtccgccagggcgttcatgtagtagatgtacgcgtcaaaggcagaggcatacggggtgaaggagttttccttctgcatgtaatggaagtggtccgcactctggagcttgcgccagacgtgggtgaggtccttgtcattggcggccttgaccggtttttccaggcggtagattttgcggatggcttcgtcctgcatgacgttgccgttccaatgggacatggttccgaaggtggagcaggtcatttcctgggtgcattcgcagacggagacgggcttgatttcacgcaccacttcagacggggtcatgaaccggttgccggcatccacgcaggcaaggatcatggtgcgccagaattcaaagacgcccgtagcgtcagactggcgttcgccaagcgtctcatagtccatggacagggtggtgacgctgccctgctggtgcgtcagccagtccgcgaaggtggtgggggaaagcgggtattccggccattccggatcggttctcatgatcgccaggtcattggaaagttcccggttgcggaagatggtggtggtgttatagacccacggggccaggaatacttcattgctggtgaatcccttgagcattgccggattgccgtccgccatgatgcccttgaagccgagcgtttccgcctgcgctgcaatggcgttggagtacagcatgccggtgttcatcagcacgtctgattcctggcggaagagttttttaaggagttcccggtgctcttcaatctgttccgcaaattcctgcggtgagtagacggaggcgagggagttgtagtacggcatcaccagaaagtccacgcagccggtttcagccagctccttgaaggcggcaatcaggtccggcctgtggtacagggcctgttccagaatgacgccgctgagggccagcccgaagcggaatttgccccctgtgagttcgatgagctgcttcatcagccgggtggccgggaagtagcagcgttccgccaccgtgctgagcacgcgggcattcagatcgtcatcttcatagaaggcgtgttctccaattttgaagaagtcgtaatgaatcagccggttgggctggtgtgccacgaaagtgagggaaatgttgctcatgtacggggaaagggctgggagttatcgtgtggggtgaaaaggcggttcttagcggttcagcacatgttcgtaaacccggatgaccttgtctgcggcggcgtcccaggtggaggccttgatgtcctccgtgctttgttccaccactttccggtacagttcctcatccgtgcagagatggacgatgtgttccgccatcttgttgacgtcccagaagtccgctttcagggctcccttcatgacttccgccacgccggactgcttggagatcacggcgggaatgttgaattgggcggcttccagagccgacaggccgaagggctccgatacggagggcatgcagtagatgtccgtgatggagaggaggtcattcaccttgtccttgttcaggaagccggtgaagtggaatttgtcgcccacgcccttgaaggctccggattcaatcaactggcggagtttttccccggtaccggccatgacgaagcgcacgtcgtccgtctgctccagaaccttggcggcaatttgcaggaagaagcccggacctttctgggccgtcaggcgtcccaggaagagcacgagcttttccggaaattttttctttcccttgaaaaccttgacggggtccgccccgttgtggatggggaagattttatgggggtctatggcgtagtgcccgctggcgatggtgcccgtgtatttgctgaccggaatgacggcgtccgcctgttccatgccgaatttttcaatatcgtaaatccatccgcgggcgtccgctccggcgcggtcaaactgggaggcgtgcaggtgcaccaccaggggcttgcccgtggcttttttcacctccacgccggccaggtaagtcatccagtcatgggcgtggataatgtcgaagtcctgctgcatggcgacttttaccgcgattttggagaactggatgactttcagggccaggtccccggcatagaggtcctccttgtttttgaatagctggaggtccgcttcatgcgtcttggagaaggtgatgcggccttccttggtgaactgcaccacgccggattccccctccacggtggtgtaggggtccagttcaatgggggcgtgctccaccagggcgaagctgtcataggaatacttccggtccacttgctccacttcccgataggagacgttgttgagacctgtgagctggaacccgtcaaaaagaacggaaggatcggccttggggacgatcactcttaaatccactttttttgccagcgccttggaaaggcccaggcaggcaatgcccagccccccgttaaccaggggtgggaattcccatcctaatgtaagaactcggattgtgctcattggttgatgtgggttgtcggtgtcgggaaggaagcggcctcatgccgtgttgtgcaccaacgcaataaaaccagatttttcatgttcggtctagagtaatatgagtaattttgtcctaataatgaaaagaaaaatggtggtttagttcaatcttgcgttcgtcatgaaattaatttaatctaaatcgaacgcttttgattctctcttctgtttggcttcaatgtgcacctctcccaacatccctgaaagacgaaaaacgccccctctccgggggcgtctcgtcaaatgggaatacaccaatgcggtttctaaaataactctcagcgtgtgccttgcggacgatggaattgtccgcgtgacgtatttcaccggaccagtgccggaagatgagcccagctatgccgtcagccccgggtattccgctcccggcgcggaggtccgggagtatgacgaagccggagtgcatgtcattgaaacgtccctgctgcggattcgcatccgtacggaggagcaaaaggtggatttttacgatattgtcacggacgaacccctgctggcggatgaaggcggctttggccgggagtccaaggactggacgggggacgcccgcgtgtggatacggaaaaggcttcaggacacggagcattttttcgggctgggggacaagccctgcgccctgaacctgaggggcaagtatttctccatgtggggggcggaccattatgattttcacgaggaatcggatcctctctacaagagcgttccgtttttcctcagcctgcgggaagggcaggcgtacggcctgctgtttgacaatacgtgccgctcgtacttcgacttcggcgcctcggatgaaaaggtgctggctttcgggtcgttcggcggcctgatgaattattatttcatttacgaccgcagccctctggacatcgtagccgcctacacgcgccttaccggcacgcccgaactgccgccgctgtgggcgctgggctaccaccagtccaaatggagctattatccggacaaggccgtgtataacctggtggagcggttccgggacctgggcatcccgtgcgacgccgtccatctggaccaccattacatggagcagaaggaggggtttacgtgggacaggcacaatttccccgatgcggcggggatggtccgctctctggaggaggacggcgtgaagacggtcctgatcgtgaatcccggcgtgaagatcaaccccgccaatcctgtttgggcggagggtttggaacggaattatttctgccggcggtcggagggcaatcttttgtcggaggaagtctggccgggactctgcaattttccggatttcacggccccggccgtccgcagctggtgggcggacctgttcaggcatgatctggaagaggtgggcgtgcgcggcctctggaacgacatgaacgagcctgtcgtctttccggaccgcacgttcccgatggatacgcggcatgagtacgacggcatgccctgttcccatgaaaaggcccataacatttacgggcagtgcatggcggaagcctcctggctgggcatgaagcgccacgctccggacaggcgccccttcctgctgtcccggtccggttttgccggattgcagcgctttgccgccacctggacgggggacaaccggtccagctgggagcatttgaagctggccaatttccagtgccagcggcttgccgcctcgggcatctccttcgcgggggcggatgcggggggcttcatggggcatcccacgccggagctgttttgccgctggatgcagatggccgcgttccacgggcttttccgcaatcattcctccggggaattcggaggccaggagccctgggtgttcggacaggaggccaccgcatatgtgaaagccgccattgagggccgctaccgcctgcttccctacatttacacgcagttccgccgttacgcggagacggggatgcccgtgctgcgctccctggcccttcaatgcttcaggaacagggacacctactggcggggggcggaatatttcttcggcgaccatctgtacgtcattcccatccatgagccgcaggaaggcggccgcttcctctacatcccggaaggcgtctggtattcctaccacacggacagcctgatggaggataccggaaaggacgtctgggtgaaatgcccgctttccttcctgcccgtgtacgtgcgcggcggggcggtcattccccattggccggtgcagcagcacgcaggcgaactgccgcggcccccgctgacgctggacgtctggtgggcgccggatgaggaagtggcctcccacctgtatgaggatgcgggggacggctatgcgtaccggaacggggaatgcgccgttcatgagttcctttaccgcggcaccggttcccattccctggaactggcgtggaagtgcgaaggggacccctgcgcgttccatgagtccgcggaggttgttctgcacggcctgcctgccgggattgccctcagcgcgcgcatggacggcgttccctgccgtggcgtggcgagggatggccgggtatggagaatcccggtagagggcaagtttgagacgctttccgcctgctggacggaggaataacaggcgggaatgtcagggaagcaggaaactgcgcctgaccgtatcccgctttaatttcagctcccgccattcatgcgtcagggtggaggaggccaccaccccgcctcccgtgcagagcgcgagccgccgcccctgccagtacatggaccggatgcccaccaggcagaagaagtctccgtcttccagaaatccgaacggagcgccgaaatgggacggacagcggagtcgcgaacgccagtcgtccaactgggagagcgtcttctccgtccgaggctgggatcccagggccggagtggggtggagcagccgtatccagtggtccggcggcagcagttcgtccgcttccagggtgaggtaggtggcaaagtggatcagggtatccaggttcagcacgctgcgggccgttctggtgacgctgccgtagggggacaggcgggaaaggatgctgccggccacgatttcatgctcgcggatttccttgtcgtcattgatgaagacgccctcgtcttccggccgcgccgttccggccagggccatggtcgtcaggcggcgtccctgctggtggaacagggtttccggggtggctccgcagaagccttcctgctccgtccaccaggcataggggtaatgaagcggggaaccgttgacggcccgcaggatgagttcacggggaacgtggggaggctgcatctctccaaactggggcgttgccggaacgcttttcaccagatgtccggaggcgatttgttcaatcatttccgcgaatacctgggcatacgcgtccggggacggttccgtccacaggatttccggagcgggcggcgtggggctttccggttccggaatgggatgcagggcggacggtattttccacggctgcgggtcatccaggcggaacgtgttgacatagaaggcggggccggaatccgggggggcggccgattcccggaagggcccggtcccgagaagaaggccgcgggaagggtgtctgatcagggctccggaagtcagcgtgcttatgtccatgcgggggccatgttaaaatgctgtggcagggaattccagctatttgaatgtttgtggagcttctcccgggagcgaaggcctccggccttcgtgcgtgaaacctcttccgcagcatagcgcaggggatttttcctttttccatttcctgtccggagtttgtaaggggccggagccccttactcccgggaatatgcccccggaaaacagaacctcgcgtcatgtcacgtgccttccccttttgaattgacgggaaaaagcactcaagtaagctctaacgaacttccgcccaatatgcagatgatgaccagaccagcgccagccctttcttcctccgccgttccggtgaagaccatgctggcggaggtgcggaagccgctcggccccgtatggtggagcgtgtttctcgccagcgtgctgctggcggcgtggggcgtggggcggagttcctggcgcattgccgcggagggggtgggagtgctggggctgaacaataacgtggtgtgggggctggacatcgtgcattttgtcttctggataggcctgggacatgcgggcaccctgatttcggccgtcctgctgctgacccgccagtcgtggagaagcccgattgcccgcggggcggaacagatgaccctgtgcgcggtggtctgcgccgccgtctttcccgtggtgcacgtggggcgtgtctggatggcgtggatggcctcccccctgccggaggtgagcggcatctggccggacatggcctcccccctgatgtgggacgtcatggccgtcagcacgtatttcctgctttccctgttgtactggtacatcgggctggtgccggatttcgcgctgctgcgggattgctgcgcggggcatttgaggcggcggtacggatggctggctctgggatggcaggggacggggcgccagtggcgcgcctatgaaaaggccagcctgctttttgcggccatcctgactcccctggtggtatccgtccattccgtggtgagctttgacttttccgtgacgcaggtgccggggtggcaccagagcatttttccgccctatttcgtggggggcgccattttgagcggcatggcgatggtccagttgattcttctgggggtgcgccgcctgatgtccggcagcggcgtccggcaggccattacgccggccattctggatttgagctcccgcttcgtgctggccctggccctggtgatgggggccatgtatctgtgggagcacctggccgtggtgctgaatggaggctctccggcgttgttcccgggcaggaatcccgtgaatgccgtgttcctgggcgttatggtcgccgggaacgtgctgctcccccagttgttctggttccgctccctgcgcaccaaccggtgggtgattgcggtcgtggccctgggcgtgcttgccggcatgtggatggaacgcttctggatcgtcgtgaattccctgaaagcctccctgctggccgccaatatcggggattattcccccagcctgacggacttggccatgatggccgggagcgtggggctgttcacggcgctgtacatggcgctggtgcgcgtgactccgtttttttccctgtgcgacgtgcgggaacagcaatccctgaacaaggagggcggggcatgaagaagcgcgtcacttccggctgggtgctttccttctcttcggaagaagcgctccttcaggccgtccggacgctggtgaaggaggagggcgtcttctgggaggtctgtgcgccttatccctgcgccgccgtccggcttgccaaccgccatgccgggagggccgtaggcgcaggcgtgcggctgtgggccgcggctggcggagtgtgcggattactggccgtggccctgtggctttactggacgcagttctgtgcggaccctctcatcacccagggcagggtgcagggctgggacaactggcccgcgtacgttccccccctgtttgaagggaccttgctcggggccggacttctgactgccgccgggttcctgaaaggggccgttctcccccggtggaacgactgggcgttcgagtgtgatttcttcaggacggatgaacacggggacggttatttcattctgctggaaggcggccgtgaagatcgtgccgccgctcttgctgcggcactgcatccggacgcgagcgaatacatccatgaggaagggggccgttcatgagaggcggcgtaacggcgatagccgccctggttctgctgggggcgctctggttcatggtgagggatgacgggggcaggaatgccgcgccccatttgtttgacaatatgaacgagcgtccgctggcggacgcccagcaggtgcgggagcccttcactcccgcaggccggaaggtccgcctgacgccgccccatgccgtcgcgcaatccctgggaacgggggaggcagtccgtgaacgggggaatgaccgggattcctttgccgcggagggctcctatttttcctccggccgcatgcaggggggggaggaggatatcatgcccctggaattgggcggggtttcccgcagccgtgacgtgctggcggaggggcgcacgctgtatctggcgcattgcgccgtctgccacggtgcggatggaaacggacgcggcagcatggccgcttatgacacctaccctcagataggctccttccgggatgaaaagtatgcggcctattctcccggaaaaatgttcaggagcattcggctggggcaggggaacatgcccgctttcggaaacattctcacggcccgggaaatctggtgcctggtggcgttcgtccgccggcttcaggcgctcccggcgcccccgcaggaagagcgacccgttactagacagggggaacaccgtccatgaacagcaatacatcatcaaccggaagggaacgccgggacaggccgggattcggctgggccggacgttccgccgcccttgccctgtggatcatttccgtgctgctgtggtgcgtgctgatgcgccagtcttttaacgccatgccgtgggatgagatgacggtggccggaacccggctgcatgaatggagaaaaccgtttgccgccgccggaatggcggtgggcgtcatcggtacgggcgtttgcctggggtgcctgttctggctctgcctgtcttccctgacgggagccgggtggggcattacgctgaggcgggtgctggcggcggcctgctggggctttttacccggcgttctggtgctggcgggaacggtcggctgcctgactaccgtcatctttccggaggcggcccgctactggggcgtggcggatatttcctctcccgccgtccaggccttcggcgtgctggacctggctgatcccgcgtggtggaatccggcgtggctgtatgtgcgcatgggaatcatcgtagtgctggcctggagcatggcccaggtatgggagacgctggcggcggaaaaaaacgtctggcagccttccttccgccgggggagcgccgctttctgcatgattgtgacggtgatgatgctgggcgtgctggggattgacatgctggcagggacgggaagggccgttctttccatgttccccgtgtacatggttgcgtatgccctgctggcgtctctggcattagcggtgctggccgcggcgtgcctgaggaagctggacggagggaagggattgccgtggccgcgcctgggcggcatgctgacggccatggtgctggtgaaagcatacatcacgtactcccagtacatgattacatggtatgcctcccttccggctaaaatgtctttttatgacgccgccttctcctggtccgggctcctgtccgcggctctggcactccagcttctggtgcctttcctcgttttgctctttcccgcgttgagacgccgcccgtctgcgctgggcgcggtctgcgtctgcatcctgcttggctccctgctggaagcatgctggatgttctgccccggctttgggctggaaccggctgcgtggggcacgtggctccccctcgtcctgctcctggtggcgatgggcctggtctgctgtttttccttcctgggggccttgagcgtccgcagggtatttcccgaatcacgatgaatgttcccgccgccgtttcttccctgttccgccgccgtccggacgagtggctgcccctgttctggctggcggcggcctgcgtgctggggctggtgtggtccctggtccatgcctccggactggtggcgggtgttccgctgccgtggccggctgggcgcctcatgttctccttttacggtgcgctggtgtacggatgggccctccccgtcctgttttctttcatggcggagaacggatgcaggcggctgaaacccgcggaatggctctggcacctctgcgttgtgctggggatggccacgattatggcgggagacggaagcggcctgctcctgatgccctttgactggtgggtttgcccggtgtttgccatccttgccgccggcaaggcgtgcgctgcgtggttccggccgttcccgtggcccgtgcggctgctgttcagttcctccgcgggatgcacggcggcggcccttctggcgctgggttatacgcaggctttgtccatgaacggcctgctggacgccttctccctggaaggcagcctgtcctgcgggctgatgtttgccgcgctgggagcggcggcgttccgcttgaacatggccaaaggccgcggttttggaatactggccgtctggatggccgccgtgctggcggcggctccggtggtaggcggcctgggggggctccggggttttcccgtgccctgggcgctggcggaggccggggccgtctggtcgtggtgcgccgcggttcccgccgtgctgatggcggtgtatctttggatgaaatccggtccggagaccgggacgtggctgaaagccgcggtttccctgcttgccttgctggcagtgtgggacgtgtttgccggggcgtggccggagctgatgcagttttccctgtccgcgtggcatgaggtggaattgtggatcctgctgggagccggagcgctgatgatggccggaaggaaggggcccgtgcggtttcctgcggcatggtggctgttgggcgccggcgtttgcggcgtgcttctggcttatgccgtaggcgtggttgccgcggtggacgttcaggcttttccggaagcccggcgcgcggaactgatgagcggctgggtgggcatggcggcctgcgtccatgccgttgccatggctctgtgcctggcgggaagcctttgcctgtggcgtccggcggatgccgggaacccggaaatggaaactccggttccgcagcgtcttttcttcattgccgccgttgcggctgttctgttgctggctacggcggcggctgtcctgctgcatgctcccgcgccggactcactggaggtcaggcggcccgtccaggatgcggcaggagccaggatttatgccgctgaggggtgcgccctgtgccacacccagatcatccggcgttccatgtccgggaaggactggcagacggcaatcgaccgcggcacggacccggatttcccttaccgggtcagcgagccggaagacatggatgccgaattcaacggggagggcgctccgcaggcgggcgtggcggcggtagggccggatttgagcaatgcggcggaatacgccgcaggcaggctggaatatgaagacgcggtatccggcggcacgcgccgcgccgcgcaggtaagggaatggctggcccttcatctttacaacccgcgggaaccgcagtttaaaaagccctggaccgtgtgcccctccatgcccggcatgtttgaagaacgcccggtggaggggaatgccccttccctggatgccctgcctgtccggatggagcagggccgggaactggtgccttccgggcgcggggaacggctgttgaactatcttgcttccctcaggagagtggaaccctcccggaaacgcgaccggattcattcttttcctggcctgtcccacattcatccggactatgccgcccatcctcccacggtggacatggaacgcctgaaaagagcccgtgcggccgccgtcatggaaaaaggcaggggcgtgtacctttccaaatgcgccatttgccacggcaacgacggcatgggggacaaggtgacctatccgcccctggccgggtccgaatggctgaaggaaaagcctgatgcggaaatcgtcaaaatcatcctccaggggctgaccgggccgatcacggtgaacgggaaggaatggaattccaccatgctgccgcccggcgtgacgaattcccgtgacctggcgaacctgctcacgttccttcgccgccagttcggcggagtggaaaaggcggcctacacgccggaacagatggacgccatccgccgggagctgtaacggcacatgtcattacggttgccggccgctctccgcgcggcatgttttttctgcacggtttcaagcaatgcaggagggcggttgcggaaaaattccacgctttacgcttcttgaatacgcggcggaaacagaggcaaatgccattccatgaatttggaaaatacgtccgccattgtttcggacaaaaacgtgttatcgggacaaatgccagcgccgacaatggcactgacaatgtcgtgataggttatcaatcttccaccagggatgaccggggcaccattgcgggctccatgtccgtcggagccgccctgggggatcatatcaaggtagggaactcctgtgtttccgtaggctcctggtccaatacggcccatggacatggtttccgtcctagtggaagaacttgccggaggctccgcggaaccttcccccgccgctttgccttcccggaaatcccgggaagcggcgcctgaacggaccgttccgccggaaccctgcgaactgacggaaaaggggtgcgtctgaatgaaaagagtttccgtgacggactgacgccgtttcccaggaaacatgacggggctgccgcaccatatccaagtgcggcagcccttttatttaaatagttccggcttacaggacgagcatgtcccggtcgtcaaattcatcgttcggtccccaggcaacttcccagtaatagccgtccgggtccgcaaaatagccatggaagccgccccagaaaacatcctggggttccttgacgatcctggctcccgcgttccgcgccagttcaatgacttcaactacctcctccttcgtttttgcattataggcaagcgtaattcctccgaacccggcgccgatgggcggaggattctctccgttgatgtcctttgccagcaaatccagcggatacagctccagtttggtgccgggagtgctgaaaaagacgacgtccggatggtcgcccgtctcatccgttttaaaaccgagtccgtcacggtaaaattgcagggccttcttcatgtccctgactccaaggcagacgatgttcattctgttcatgttcttcttcatgggatggtatttgaaatgtttgatggagatggcccggatatcggttcctctgcaaaaaaaggctgccctccgcaccgtgtaccgggaaggcagccggatgaaagtggccggggaaaaggtcagctcagggcttccaccagcttgtcgccgtaggcggagcaggaaagctccgtggaaccgggaatcatttccgcgaggtcgaacgtgaccgtttttgcggaaatcacttggtcaatggcctgaatcagcaggtctgccgcttccgtccagcccatgtagcgcagcatcatttccgcggacaggatgacggagctggggttggccttgtccagtccggccagtttgggcccggtgccgtgcgtggcttcaaaaatggaatggcccgtcaggtaattgatgttgccgccgggcgcgatgccgatgccgcctacctgcgccgccagggcgtcggaaatatagtccccgttcaggttcagcgtggcaaccacgtcgaaattctccggatgaagcaggatttcctgaaggaaggcgtccgcaatgcaatccttgatcacgattccattgggaagttccagccaggggccgtctccgatgggctgggcaccgtattcccggctcgcgacgtcgtacccccagtcgcggaagccgccttccgtgaacttcatgatattgcccttgtgaaccagcgtgacgctcttgcggccgttctccacggcgtaatcaatggcggcgcgcaccaggcgctccgtgccttcacgggaaacgggcttgatgccgaatccagagctctccgggaagcgcaccttcttcatgcggtccgggaagatgcggctcatggtgtcgaaaaacagtttggcgtcctcggatccctccttgaattcgatgccggcgtaaatgtcttccgtattctcgcggaaaacgaccatgtccaccttttccggagccttcacgggagtttcaatgccgttgaaatagcgcacgggacgcaggcagacgaacaggtccagatcctgacgcagcgtaacgttcaggctgcggatgccgccgcccacgggggtggtgagggggcccttgatgccgaccaggtaggtccggaaggcttccaccgtctcattcgggagccaggtacccaggttgtcaaaggacttctgcccggcaaaaacttcataccaggcaatggaacgcttgccctggtaagctttcttcacggccgcgtcaatcacccgggaagccgccgcccagatttcaggcccggttccgtcaccgatgatgaagggaatgatgggcctgtccggaacgcaaagcctgccgttctgcatggtgacggctgcgccgtccgtgggaggggtgaatgttaaatttgccatgacgtgcgttcctttataggagccagcccgttttggcaagataaaagaacggaatggggaagtgcgcatcatggagctcttgatggccgccgggcctctcgtacgggcagtatcagaaccagcggtcctttccgggcggttcttccggctgtccggcttcttcccggaggcggcgcaggaaattttcttccgcctggcgtatcaagccgttctccatgatgtgcttccgggcgctttcgttcaactggttgacggcaatggcggcgtcttcggaagtcagcctgttccagatgccggcgtcatccctcacgattctgagggagccctccaccatctcgcaggaaaccagctttccgtgaagcccctccgcggtaatggggcctttgttccctgcgggaatgataacccggagcggctcgggtccctccaggtcaatgcctccgtgggcgcggtaggccgctttcaggatcagcgtctttttactccaccaccacgtggtggaataccggtattcatactcgaacgtccgttccacggtcaccaggttggctaccttctcgtccttctgcacgatcagggccacgccgccgtggtcggaggaaaaccctttgttgatcagggtgaggcctacctccctgcctgcttcaatcaacttttccgccacctccatcggtttttccaccggggcggtgatgcaggaccgcacgccccagaacagcatggccagggccccgatcaggacggcgcctttaaccagaacgacgacagcaggggaatgcaggaaggaggatgggggggtatcactcatgaaacgttgtacgggacgggaactcagggttccgggtcttcatgggaaccgtccttcttgaggggaggcatgaacagggccaggaatgtgaaggcgatgacggtcaggtcgtctatctggcctactccgggaatgaaatccggaatcaggtcaatgggggaaaaggcataaagagccgtcagcaccaggagaacaagcttgcgtttggtgaaaaggcgcggttctccttcccggctgcggaaataattgatggccctggtcaggaattgctgcctggacccgttgggtggaatgggaagcttgtttttcatggggctgcaagggtgaagttgcgggaaatggaaaaggaacgctccgttacggggagaaaaggcatgaatgcaggcaggagaagatgataccgcctatgataacgagcgccacaatcatggcctcccggctatttgtctgggaagcaacatagagcagggaacgcctgtaatcgtctttgatgggtggcttttctttcatcagggagcttttctgaaattatctcatgcgcttccggctgcgtccagagcaattcccggatgccgctgggagtatgtgtcctgccgtttaaaagagagtggaacgtttacggcaaatacgttatatgggagaaccttctttccagaatatcccttcatgacattcaaaccggcagaggggaaagagaatcaggcaccaaatagatgccggaaggaagaaacggtatggcgtgccgacaagagaacgcggcagggaaggaaatggctccatggggaattgcttccgtttctccgaatcttgttgcactcccttttgcgatgtgctggaatcgtctgatgaacaagtggtttttgttttctctgtgcatgttgttcggtgcagtgctaggtgaagccgaaagttctccccctgatagcggcagggagcaggttgattcttccgtctggatcaatgatgaatcaccccatttggctcccgtttattttacaggagtcatgcacaagcggagcaggtgggaaatcgatattatttccctcaacagtcatgaattgccggaaccgatgaccgtggctttggaaaagaagcctgcggggttcacttcttctgcaggaggcacgccctgctgcgggattattccgctcctgatcccctccggagcggaagaagaaccccggcggtggcgtgatgcgggagcttctccctctctggtgaaggaaaacaccccccaggctctttcccttttgcaggaatcagttttacaaagctaccagcatcaaattattaaatccataaaaatgaccatcggcatccttgaacggatgacggatgaaaaacaggcgctggcgctggaaaagagctgggcttatgaaattatagattatactttctggatattgctggagggaagcgttcccttcgatgcaagaatggcttatgtccaacgtaatccggacgtcctgaagcaatcgcagaaggagtcggacgcctattgtgaaagggttcgcattctccggagcaagccgtggagcggcaaattgcgcctgttgcaggataaaaatgaaaatcttccggcgggggttcccagttgccttaatccttaattattttgttcatgaaccatggaaacattgaattcaggaaagtaagcggctttaagcggggaacattgtttgaattactgtcggacgcctattcctttgacgagaggtgggaggattgctgcgcttccgactggaaggagtttgatcattttttctttgataacccgcagattgctgaccaatacggttttataactgtcttgaatggcaaagccgtcgggctggcgtcgtgggacccgaggaagatgcccgaatacgtggagatagggcacaactgcattatctcctcctgcaagggccatgggtatggcaggatgcagctccgggaggcgcttcaaagaatcgtgaaaaggggagcgaaaagaatcatcgtcaccacgaatgcccgctcggttcccgcccggcgaatgtatgaaggcgcaggttttaagatttgcgggaaaaggaggaatgaaagccgtaccgggtttttcggggattacattgattatgaaatgatgctgtaagggaaagagcgcagcatgaaaggagaggggaattttttccttgccgtttcccaagcccgggcggcgatgtcaggaagctgagcgcagggttcatggagagtggaagaggctgcctttcccgcttgcctgcggtcattttctcccagcctgggcgaacatgaaggcggcattgacacggcggggggcagggggtactctcctgcggcatataatgatcagttttacgaatatcagcggggccgaggagattggagccaattgctatttgcttgaaatggacggcacccggatcgtgcttgacagcgggatgcaccccaagagggaggggatggcggccatgccggattttgattccatggagcccaattccgtggaagccgtttttttaagccattcccacctggaccacctgggaacgctgcccgtgcttcaggagaagcagcctgcggcggaagtattcatgacgcccgccgcagccgccctgtctgaagtgatgctgcacaattccgtgaatgtgatgagcgccaagaggctggacctgggcattgtggagtatccctttttcacccataacgatctggacaggctgagcgacgcctggcatgccaagtcctgcaacgaggtgttccgcgtgggcttccgccagaacgtgctggccacgttttacgatgccggccacattctggggtccgcgggcgtgatgctggaaggcgagagcggccatacggtgttttatacgggggacgtgcagtttgaggaccagagcatgattcccggagcggatttcccggaatccggcgtggatacgctgattatggagtgcacgcgcggcggcttccagcgcagcgcccattattcccgcccggaggagatggtgcggttcgggaaggcgattgcggagacgctggaacgcggcggcgccgtgctgattccggtattcgccatcggcaagagccaggagatgctgttcaatatccaccgtttcaagcagcagggggtgattcccgccaatacgcccgtgtacttcggcgggttgagcgcgaaagtttccctgctttatgaccgttttgccgggctgacccgcaggcacgaccatgagttcaagctgaaggaggaaataaagaccgtgcccctgccgcgcaagggaaaagccccgctggtgtgttcccccgggaatatttacgtggtttccagcggcatgatgacggagaacacgctctccaacgtgatggcggagcaggttcttccgcatgagaaaaacgccattctttttgtagggtatgcggacccggattcccccgcgggccggctgcgggccgcgcaggagggggatctggtgaagatgcggcccaacgggcagcccgtgcgccgcaattgcacggtggattgttttgacttttccgggcacgccacccgtgacgccctggtcaattatgccgtgaagctgaatcccaggcaggtggttctggtgcacggtgatccggatgccgtggagtggatgcacgatacgctgtccgccagaatgccgggttccaccatcatcgctcccgttccgggccagcgttatacgtttgagtcatgagttttaccggagagagaaaaggccgcctgatcgtctttgaaggcatagacggcacgggcaagtccacccacatcggccagttgcggaagtatctggaggggaaggggctggaagtggtgcagagctttgagcccacgcgcgggccgtggggccggatgttgcgggattccgccgtgacggggcgcctttccgtagaggatgaggtagaattattcctgaaagacaggcgggagcatgtggagacgctgatcgcccctgcgctggcgcgcggcgcgtgggtgttgctggaccgctattacctttccatgatggcttaccagggcgcgcgtggggtggatacttccgtcatccgcgccgccaatgaagagtttgccccggtgccggacgccgtggtctggctggatattcccgtttccgtggctctggaacgcatcgggagccgcggagaacgcgatgcctttgagacggaagcgggcctgacggcctgccgcaacgtgttcgcctccatccatgaaccctggatgctccgcgtggacgcggacgccgggaaggaggaagtggcggcaagagtgcggaaggccctttccgggaattttcccgaagtgattagtgaataggcgtattccactggccggaggccgggaattttcccttaatatttaatccccggtatttggtcgctgcgccgcaggcgcataaaccgtcgggtccgggattccggcttccctgaaggcttcccggcgctccacgcaggtggagcaggcgccgcagtggacgggaccgcccttgtagcaggagtaggtgcgggagaagtccacgcccagttcatggcccatggcggcgatgccgcccttggacgtgcggatgaagggacgcaggatgcccagcccggcataggtccccaggcggacggcctccgtcatggcggccatgaattcctcccggcagtccgggtaaatgctgtggtccccggaatgggcggcaatgacaagctgctgcgctccgcagctttccgccaccccggccgcgatggacaggaagatgccgttgcggaaggggacgacggtctgcttcatcagctcctcgtcataggagccgtccgggatgtcgtccgcgccggagaggagggcggatttcaaatgggtggagatgggggagatgtcaatcacgcggtgctctatgcccaggctggcggcctgccaggcggcgcattccagctcccgttccgcgtggttggaggcgtagtcaaagctgagggccacccgcacgcggtggttccggtgcgcccagtgcagggctacgctggagtccagccccccgctgagcagtacggcggtttccgtcttatccatggcgcgcgtcagagggggcggttttccgggttgtgctccgccatggcggtcagctggatgccgccgcggggggagaaacggccttctactttcagccaccgcggggagatggcggctgccaggtcatccgtgatgcggttgacgatctgttcgttgaaggccgggtagttgcggtaggaggccaggtagtatttgagggatttggtttccacgcacttttcatccggaacgtaggtgatcgtcagatggcaggagtccggctgcccggtgacggggcagagggaggagaattcatgggtgtccagcgtgatggtgtagggacgcgtgccgcggttggggaaggattccagcttggcgtcgtcagggctggtgaagaaggagctttgtgagccgagtagagtcagaggttcggacatggatggttgatgttgtgttgtagtggaaattcagttttcctgcgcggcggcgtctttttcctgaacgggttccctgccggggaattctttcacgtacaggtcctgctgggggaaggggatggagatgccgtgctcgttgaacgcattatagatgtgttcccgcacggaggaaaggctggaggccttcgtcatgacgggaacccagacccatacgcccagattgacggagctgtccccgaagctgtccagcaccacgctggtttttttcaccttggaaaggaagggcagggaggacagcgtttccagaacgatttggcgcgcccgctccacgtccgttccgtaggagatgcccacttccaccttggagcattcgaacttgtggttgcgggtcatgttgcggaagttcttgttgaagagctgggagttctggaaggcgatgatggagccgtccagcgtttcaatcatggtggagcggtagcccagggaggagacgcggccccggtagccgtcgcattcgatcatgtccccctgccgcaggcgccccagcatcagggacaggccgctgatgatgttttcaatggtgtctttcagggcgaagccgatgcccatgctcaagccgcccatgaccatcagcagcccgttgtagttggcgttcatgatgatgagagccgtgaagacgaagagcccccacaggaacagggaggaaagcgtcacgaaggtggggatgatgcccacttcatagtcttccccatagacttcatgcagggtgtttttaccgatgaagatcaggtagttgagcacaatggcaatcaggatgaccgtgatgacgtggctccagctgaaggtgagcaggtccttgatttccgtggtggcgaagattttgttgatgatgaggtcccccatgtcgaaggtggcggcgggccagatgatgctgaacaggatgaggaagatggtcaggcaggggagcaccagcttggagacgaaggggcggaaccacaggatcgcctgcttgttccgttccttccggcggttttcatagtggtggagcaggttccacagccccaccaggagcaggatgctggtcatcagcatgatccacgtcatcagcaccaggaaggccatgaagctgaacccggcccagcacaggccgctgcccaggatggtgagcaccagggagacggtggcgaagaagcggtccagacggggaagcttgtgccgctgccgcacccaggtcagcagggagaagagggaaaccagcgtgaacaggacgggcatggaaatgtccacgatgatgttgggtgccatgaacatgcgcagcagcatgaagaagccgcccaggagcagatagggcatgtagatgcggatgccggagttaatggtgccgtaggggaggcgcgtcaccagggagaacaggatggcgctgaccagcaggaggaattccgcgcccagggaggccgcgcttttcagcaggtagtccggcgtgcgcatggaggcgatgacgaggacgagcgccacgatgaggatagtggtgacgttggtgaaggcgtggcgcttgttgtagtggcccgccttttccagcgttttcttgaagcccaggaagacgatgaggcgggaaaggcagtaggagcacaggacgatgcccagcaggatgagcccgtagtgcttgagcgtttccgggtccgacgggagctggagcttgctgtctgcggacgtttcccaggcccccatgcaaatttcatacgtcttgagcggcttgaggaagatgtaccgggccgcgttggacggcgtgtagaatacccggttgaagagggaggtgaacagcttgccgctttcattgttcagggcgtctatcttgccgcccaggctgttgaagagctccttgaggtagctgatctgctccttttccttgagcagggattcttccagggtgcggcaggtgtacagggcctcgtccctctgcaccagggagggttccgacaggttgtccgtgttgacttcctccagggattccgccagttttttgatgcgccctatttccttgtccagccgttcctcctgtccctggaagtccggcctttgggcgtaatacgtcttgaccaggctggtggcggccttgcagtaaaaggccagcgtgaagattttctgatcgtccagggcgtaaagcacggcggacatttcatacaccctggtgtcaaagtaattgtaggtggcgtccgcctccttcaccagcgcctcccggatggccatccttttttcctcattctttttcaggatggtgatttcatggcacagggccatgatgacggtgtccatttccgagtggtcaggctccgcctggggctgctcgggggctggttcctgcacctgttccggaacggcggcaggcgcgccctcctgctgtgccgcagcatggcccgcggccagcacacctgccaggaggaaggcggcgcagcagcggaaaaacgtccggtaatcagggatgctcatgaacggttccagttctaggggctgggggcatcacggtcaaggttatattcccccgctgcctgagacggctttgcggtgggaaggcgcgcgctttccggcgcatcatccggccacttttttcagaaaccggcattccctgcccggcgggtggcccttattgatttcatgattgattttttaacggaatattgggtaatatataaataatttcatgaattgtatgaaggagccggaaattttaaccatagacgcccactgccatttgttcaaccacgaggtcctttcctggaggctcctggtggatttcatcctttcccgcatgcgtccacggggaacgcgggcgcgtctggaaacggcgggaggcatcagcgagttgaagaggatcatccgttttttcaagacgggcttgatggatacggagaatatttacggcaagctgctggcggagggcggctgcaataccgtcgtgccgctgatgtttgacctggattactgcatgaagggcgccggtggggctgacgggctccggcggcggaaggcctgcaagaggaatgtaaaaagggaggcgcggaaggaatgggccgtgctccggaaggagcttgatgagctggcggaacagaccgggaggggggacaggagggaaatcggggagatgaagcaggcgctccgccgcctgtccaaaaagacggaacggcttcccctggggaaacgggatgcgttccggatgcaggaagaagaactgctcaaactggcggcggcgcatcccggccgcgtgcttccgttttacgtggtggacccccgccgccccggcaactggctgcatggtccggacgggacgattgacatttcccccctgacggacaggctgcttccggaattgggagggaagggcggtttttacggcttcaagctgtactgccccaacggctattcccctacggacccggcgctgatggccctgtacgagtattgtgaacggcacggggttccgctgacggcccattgctccggcggcggttttgccagtttttccccttccatcacggtgcacggccacgtttaccggaatggagaggttgttccgcatgacggcgttctggaattcaggcactaccgcctgacggacaagctccgggtgaaggagaaggcggaactcctgaaccatccccggctgtgggagaaggtgatggaggcttttccgcgcctccggctgaacctggcccacttcggctgccaggacgagggcacggagtggacagaactgatttacggcatgatggagaagttccccggccttcatacggatttgtcctgcatcacggagacggcgaagctcagggagatgcgggagtactttatcaaggccccggaacaggtgcgccgcaaattcctgttcgggagcgatttttatctgaaccttctttttctggacgggatgaaggagtacatggagaacttccggaatacgtttacggagcaggaaaggcaggagctgatgacggccaatctctccgcatttctgggattgtcctgacggaaacgggaaacgctccggagaatatccggagcgtttgaaaggaagactgtgttcctgcgggaatcagttcagggagaaggaacggatccttttcacggattcctcccggcccagcagggagaagacggaggagaggtccgggccgccgctcagtccggtgagggccacgcgggcggggaacatgacggctcccattttcacgccgttttccttggcaaaggctttcagcacgccgatgagttcatggccgtcccattctggctcccgctccagcctgtccgccagtttggaaagcagttccagggcttccggctggaccttggcaacggcttccgggtccatgcccaggtcaaagaagaaacggattttgtccggcacctccgccagcgtctgcaccttcgtctgcacggtggcgatggcggcgtccagaatcggggagtccggcagtccggcattcaggcagaaggggcgcgccctggccgtgaattcctccggagccagcgcaatgatatgctgctggttgacccagcggcacttggtgatgtcaaatttggcggcggaatggttgacggcttccagggagaagcgttcaatgagctcctgcggggagaagatttccgtgtcgtccttgggggaccagcccagcagggccaggaagttcatcacgccttccggcaggaagccttcttccggatacgcgcccagggccgcgcctacgtcgcgcttggacatcttggagccgtcctggttcaggatcagcggcatgtgggcgaagaccgggggagtgacgccgaaggcctcaaacagctggatgtgcttgggcgtgttcatgatgtggtcttccccgcggatgacgtgggtcatcttcatttcaatgtcgtccaccacgttgacgaagtggaagatgtaggagccgtccgcccggcggatggccatgtccggcgtgttggaagcgtcccggtagtcaatggtgatgtctccgcagatcaggtcatggaaggtgacgggcttggagcggtcaaagcggaagcgccatgcgccgtcgtcctcgtacacgcgtccggcatcctggagcttcttgaaataggcgtcgtaaatatcgttgcgctggctctggaagtaggggccgcagtcgccgcccttcatggggccttcatcccagtccaggcccagccattccatgccggtgaagattgcgcgggtggcttcctccgtgttgcgggcgttgtccgtatcctcaatgcggagaatgaaggtgccccccatcttgcgggcgaacagccagttgaacagggcggtgcgggcgccgccgatgtggaggtagcccgtgggggaaggtgcgaatcttgttctgacgtgactcatgatgggtaagagagtaagggccagcctgcccgcgtcaagcagatacagggggtgcatgccaaaaaacggggcggcggcggcggggaggggcaacgggctttttttagcgcgttgtcggccttgcggcttgcctggaaggggcttttaggcttcatttaacgccgtgttctttttaaagcacatattccgtctgcgggagaagtggcagattcagagggatgatgaggaaaagccctttctggagcatctggatgacctgcggaccatgctgctgaggatggcgctgtgcctgaccgtcagcacgattctgtgcgccgggtttgcgtccaatctgatggacatcctgaggcgtcccgtcaaccaggtgtgggacatgtttgaggaatcccacctgcccgcgggaataggcctggaggcatgggggaaggccaaggaaatggctacggccatgacgagcctggacgactcccagaagaaattgcttctgcggcaggtttccccgtcccagggggatttgacggaggccgccctggtgctccgcggcgcgcagcccctgccggaggacaggaagaagatttttatcagggacggcagccccacctcctccgtgcgggagctggcggaggccctggatgccaaggaagccattctgacggacggcaccgggcggggcgccctcaagatgatgagcgcgttccagccgggggaggcgttcatgctgaccatcaagctttccctgtatgccggggtggtgatctccttcccgctgctgctgtacttcctgctgcaattcattattcccggactgctggagcatgaacgcaggctgctgtacaagtgcatggcgatcggcttcgggctgttcctggcgggcacgctgttctgctacttcatcgtgcttcccagggtgctgacgttcttctacacgtattccctggaattcggcatttccaatgaatggcgcatcggctactacctgtccttcgccacgcagatgatcctgatgttcggcctggcgtttgaactgcccgtggtggtgatgcctttcgtcaagctgggcgtgctgacctacgacatgatgaaggccacgcgccgctacgccattgtggcgatcgccatcctggccgcggtcatcacccccacgccggacgtagccaccatgatgctgatggccgttcccatgtatgcgctgtatgaaatatgcattatcctggcctggatgcatgagcgcaaggaggccgcccgcgcccgggaggaagtcgcccggtttgaagaagactttgacaacaacaattctccctacaaccagtaaatacatccaacccgcgccattatcatgaatctcctggaaatcatcatcctgggcattgtggaaggcctgaccgagtacctgccggtcagctccacggggcacctgctcctgacggaatccctgctgaacatgtcccagagcaaggaggctctggacgccctggccgtctgcatccagggcggggccatcctggcggtgctgagcctgtattttccgcgggtgaaggccatggcgcagggcgtgcgcggcaataatcccgccgggctgaaactgctggtcaacctcattctggccttcctccccgccgccgtggtgggtctgtgttgcgcctccctgatcaaggaatacctgttcaacacctacacggtggcttattcctggattgtgggcggcggcgtgattctggcgtactgcgcctggcgcgccagggaaggccgttccaatgaagggaactccggagcctccattgagagcctgaccccggccagggcgctgacggtgggcgctctccagtgcgtcgccatgattcccggcaccagccggagcctgatgaccatgctgggcggcatgttcgtggggctgagcgtggaggcggccgtggaattcagcttcctgctggggctgattaccctgggcgcggccaccgtccatgatgcgtacaaggacggggcgctgatgctggaatccttcgggtgggaagccctggccgtgggaacggtggtgagctggctgtccgcatggctggccgtaaagtggatggtttcctacctgcaaaagcacagttttgccgtattcggctggtaccgcatcgccataggcatcgtgaccctggtgctcctgtccatggggctgatgcattaaaaaacgttctccggcagttgaatgccggaggccgactaggcggccttttttattattttccgcggcagggaaaggttctttgaaaatgtaacctgattgtaacacacgggattgatttttcaggcatcatggggacatgaacatcacgtggtgcctgatagccgtatgggcgggaatagccggactggcgcattcccaggaaatccgcgacgagctgggtgcccggaatatcattctgccgcagaggcgcgtgattcttccggcggaccggacggtccggcagccggtcacgatggaaaaggtgaatgcccgcatcctggtgaacggacgctccgccgtgaccaccctggagctggatgtgcggaataacggttcttcccccgcggaggctgagctgctgctgcccgttccggagggcgtggtggtgaaaggtttttattatggggacggaaaagcggagtggaaggcctccctgatgccagcggacgaggcgcggcgcctgtatgaccgcattgtggcgcgcagaaaggatccggccctgctggaatttgcggggttcggggccatccggtccagcgtgtttccggttccgcccaggtcttccgtaaagctggggattgtttacgaacaactgctgacccctgtggaggggcgtctggattacgtgctccccagaacggaagctctttccggggatgctccgtggacggtgagggtggagctcgcttccggaaaggacggtccgggcaacatcttcactccctcccatcagatggagcgccatcagctggagaatggaaccgtggttctgaccctggcggaggaaaggatgaacccgggccctttccgcctgtcatggctggaggcgcgcgggaagaaaggagaagcttcttccgggccggaagccagcgtttacgcctctcctgacgcctccggcgggaaaaacggctattttctggcgatggtgggcaaggatgtccgccccggtgaacactccattctccgggaagtcacgctggtgctggacaggtccgggagcatgcgcgggaacaagctcgccagcgtgaaggaggcggccaagcagatcgtttccggcctgaatcccggagaacggttcaatatcatcacttataatgaaggcgtcaatttatttgaagcggccccggtggaaaaaaatggcgcgtcggaaaaagcggcccatgcatggctggatgccgtcgtggcgcgtgggggcaccaacatgcacgaggcgctggccgccgccttgagccagccttcccacgaggggatgctccccgtggtgcttttcctgacggacggccttcccacgatcggccgcacttcggaaaaatccattgcggccctggcgggggaaggaaacagggcggaaaggcgcattttcaccatcggggtgggggaggacgtcaacgcccccctgctgaggcgcatggcggagatttccggggggctaccgtgctacatcctttccggggagaatctggaggtcaagctctcgcaggtattccggcagttatacggccccgtcttccggaaggtgcgctataccgtctgctccccggacggcagggaacagccgggaagggtgcaggacgccataccctccggggttcttccggacatttattccggcaatcccgccgttctggccgggaggtacataggtacggaacctttcctgattaagggtacctgcctggaccgggataacagggagcaggcttttgccattaccgtggatccgcagcgcatcgccagcatgaaggatgattttgtagcccggctgtgggccgcgcgcaagataggcagtctggaaaccgctctgatggatatgggcggcagctcccccggcacggaagcgctgaggtccaattccaaaacggcggaattggtggaggaaatcatgcggctttcacgggacttcgggatcatgagctcggcagcctccttttttgccgatgaaggcagttccggcccatggcggcgggatcatgcctccatggggagcagggggaacctggaggggaaggtgatggaggaattgcgcgaagggctgggcgccattgccctgcaggaaaatgccgtagccaagaagcgggaactgaccctcaacaagtacaacatccagatggaccgggagggccgtgccgtggcctttgacaatacggcccagattgcccagaacggatatttcaacagaaacggagtctggatggaaagcacggttcttgccatgccggacgcgggccgcgccgtgaagacggtccaggtgggcacgccggaatatgccgacgtggcgaacaggctcattcagtccaaccgccaggggctgttggctctggatggctccgtcatgattctcctggatggagaaaccgtactgatgcaaaacagttttccataaacaaacaactagtaatcaacaatcatgaaccgtatcatcgcatgtactgcattagggttgctgggcgcaggatcattctgcgcccaggccgaacccactcccgttccaacggacggcaagcctgttccggaaggaaaggccagatactccgtcaccccgggactggagggggaaaaacaggacgctaaaaccggaaccgtcttggttacggtgaaaagcgtggacgcggaaaaatccgcatcagccgtgaccgtgaccaccaccggaaacggggttgtcctgacgaaggccgtgaacgccggtccggagaaagccatgggagcgcggaatgccgcctattccgtcactatggtgaaaggaactgctccgggggaaatggaaatccgtgtgacgccgcgtgcggaaggagcttcttccggaatttcagccgttccgccgcaggaaggggtgttcatcaccaggaaggcggcaagccttcccggcggttccgggaaggaaggtattttccgtatcaagccaagcgcggttgaaccggtcagagaagcggcctattccatcaaaacggaagggagcggctccgaaaagctgaccataagcgtggctcccggtctggaaaaaacttcttccggaggggcggccgttcctgcaaaaggggatgtggtcgttacccgggctgtcgtgacggggaatgccaaaggggtgaaagacgccgcctattccgtcactgttgcgaacggaacggctcccggagaggcggagatcagcgtaacgccggagcaggaggaggcttcctccggaactcctgcggctcccgtccagggcgccgcggaaaaagatgaccgcgccgtcgttcagattgccctgttgctggatacctccagcagcatgaacggcctcatcgaccaggcgcgcacttatttgtggaagattgtcaatgacatgacgctggcccgccagaacggcaaattgcccgatatccggcttgccctgtatgagtatggaaacgacgggctgtcctccagggacgcctggatacgccaggtgcttccgttcacggatgacctggacaaggtctccgaggaattgttcaagctgaaaacctacggcggcacggaatgctgcggagccgtcattgaccgggccgtgaaggagttaaaatggaatacggatgatccccatgcgctgaagctggtcttcatcgccggcaatgaacccttcaaccagggcagcgtgccgtatgcggaagcgattgcgcgcgggctggagaggggcattaccgtcaataccattcattgcggcaatgccggagactcggatacgcgcctgtggaaggacggagccaaaaagggggacggcagctttctcaacattgaccacaacgcggctcccccggacccggaaacgccctttgacggagaacttgccaagttgagttcctccctgaatgcgacttacctggcttacggttcaccggaagttcaggctgaaaggctgagcaagcaggaacgccaggatacgctggcgctgaaactgtcgcctgcggctgccgtagggcgggccagcgccaaggcgaacaaggcggcgtactccaatacttcatgggacctggtggatttttatgaccggaacggagtccaggcgctgggagatttggggactgccgggcagctccccaaggaactggaaggtaaaaccgcggaggaagtggaagccatcgtgaaaaagaaggcggaggagcgcggagccctgcagaagaaggtaaaggagctggacgcccggcgcaatgaatggctggccaaatggaagcagcagagcgcttccagggacgccaaaccgaacaccctggaggacgccattatccaggctgtccggcagcaggcctccaaaaagcagttttcctttgttgaagagaacgaaacggaaggaaaagattcccctatgaatgatagagtgaagaaatgagtgctcctgcggggctgtccgggagtgccggcggccccgcagaatttttcttctgaaaaaacctgttttaccgcaacgttcctatttgatagattattccgcgcatgcaccgctaccgcattctggtcgtagaagacgatcatgccattagaaacggcctggcggacgccctggcggtgtccggctatgacgttttgtccgccagggacggttatgaagccatggagatgattcatgcagaggagtatgacctggccctgctggatgtagtcctgcccggagcgaacggttttgaactgctgaaacgcatcagggaagaccgctccaccgttccggtgctgatgctcaccgccaagggcgcggaggcggacaaggtgaaggggctgaagctgggggcggacgattatgtggtgaagcccttcagcctgctggaagtgctggccaggatagaggccgtgctgaggcggtccccggaaaggcccagcgccgtcaaccgcgtcatgctgccggaggggcatctggattttgccgcccgcgccctggttctgggggaggagcgggtggtgctgaccaccaaggaatttgacctggcgcgccatctggcggccaatgccggaagaatcatcacccgtgaggaaatcctggcgagggtctggaagatggacccccggctggtggaaacgcggagcattgacaccacgatcgcccgcctgcgggaaaaaatggggaaaaggaactccgccgtcatccgcaccctgagagggcggggatatgtttgggaggacggagcatgagcagccgtttttccttccatttgctgttgtggtcctgcctgctgattctgctgggggtgatgggatggctcagccattccatgctggatgcggagaagcgcaggctggcggaaacgcaccagatccgcctggtggagcagagccgcctggccctgtggcgcatggattccctgctggcctccatgatcgcaggggagaacaaccgttctcccggagaatatttccaggggaacgcgctggcggaagtccgcaaggaggaaggtgcgatgccggatttgtccggctttgccaagctgtatttccagatagacccgcggggaaacgtttcctctccccagaaggacagggaacggctggaatatgtcctgcaactgggaagatccggctggggcagccgtgtggtggatgccatgaagaatttgccgaggcctgcctccatctccgcggggaatgccgtgcagccggagaccgccccccctgcggaagaagcggtacaggtgacttccgtcgccatcatggatggaagggagcagcagaagaacggcttgcagcaggagctggcagtggaaagcaggaaggctttccagcagggaatggaagactacaacatgcgtaaaaacctttccaacagccagcaggagtacaatgtcagcgtcaaggtgaaaaagaaagccatggagcctccccggcgggcaaagaaggagattgcggattcgggacggctggtcgtttcaggggaggtgaatggcatggaaagtccggaaggggattgcctggatgtggctggttccttgaaaaggaccgggaaaaaattggaaagcggggccggcgatattgcggctctcctggatatgggtgccgcggcattgactctggacgggaagatggtccagtttgatgttcatgaacaaaaggcgaatccggttccggtaaaggaaagcctggcggaaatgtccgtcacccgccgtgacgggttcgccaaaactccggaaagttacagggagttctccatttcctccctccagcccagatggcagcaggggaaggaatgtttcctgacgcgccgcatctcggaccacggccaggtatgggtgcagggaatctggctggactggggcaagttatccgcctacctgctggagtccgtagccgatattttgccggaggccaccctgtctcccgccgacgggcgggaggaaagctatctgaccctggccggaattcccgccatgctgaatccgggcaatcttccctccatgcccgccaattccctgcggacggtctggaattccatggcgatggcgtggttttgcgggcttctggccctgtgcggggtcattggcttcatgatcggcctcatccgcctgagcgaacgccgcgccgtattcgtttccgccgtgacgcatgaactaaggacgcctctgactacgttcaacatgtacacggaaatgctttcttccggactggttcccaagggcagggaaatggcctatgtggatattctgaaaaatgaggcgggcaggctgacgcacctggtggacaacgtattgagctacgcgcgggtggagaaaaattcggtctccctccagccggaaaaaattccggtgacggacctcgcctccgccgtcattgcccgcatctccccccggctggccgccgcgggcatggactcccagctttacgtggctccggagctgcaagcggaggccgtgactgcggacatgaccgccgtggagcagatcgtgtacaatctggcggacaacgccgccaaatacgcatgttttgacggcagcgtcctgaaggtggaactggcacgggaaaagcgttttctggtcatccgtgtggaggatgaagggaaaggcatttccgattccctgaaagggaagctgttccgtcccttttccagatctgcggaggaggctgccggaaaacagccgggcgtggggctggggctggctttatcccgggaactggcgagaagcatgggcggagacttgtgcctggaagaaagttcccacggatgccgctttgccctcaggattcccctttccagggcatgagggcacaggagggcctgttccggaaaaacaaaattctttaaatcagccgtcattcaggttttaatcctttcctcaccctctttatttttcaagaaccatttccttttatgaatactccattctgccaaagctgcggcatgcctctgggaagcagggaagactgcggcaccaaccatgacggaacctccagtgaggaatattgccgttattgctttcaggacggcgcatttacgtcagaatgcaccatggagcagatgattgaacattgcgcccggtttgtggaggaattcaacaaggagaatggttcctcctacacgaaagaggaagccattgcccaaatgaccctgttttttcccacgctgaaacgctggaaaaaacaatagaacgtcttttcgttccatcccttattcacagggaagggcctgtccttttctcctttgttcgctggccgccttctccctgcggtacgggatgtcctggaatgtttaaaaaccccgggaaggcggacgcatattgtttaaagtaccctttttccttgtccgctttcggctcccctgctggccggaggcccggttcataacatgatccggggcttgtcttcctccggtttgccagccttgctcgaaacagccccatggtgagaacgtttcaggggtggattatctcctctgcggtccatgggagcctccggggccggaaggccgtggtgagggagacggacgggacggcgcagccgcaggaggcgaagacggcctgctgggcgcgctggcggacggcggcggggaagaaggtctggaaacggatggagggctgctgggacggttcatgcccgaatgacccggacgggaggcggatggcctggaggagagcgtggagggccggttcccctccggacggctgatgcccggacgatgcgtgctcccggaattgccggagccggggcggtggggattgttgacggacgggcgggagggctgtcccggctttccgaagtccggcctgccgtggctgccgccgggctggcctattcccggacggttatggctgccgcccggattacttacgggaggacggtgggaattgccgggttttccgaagtccgggcggtggttgggcctgccgggctgcggaaccggcctgttgttgcccgggcggtggtccggacggaaatgatccggcctgtactggggcttcatcggcggacgcgccatggggcggcagtaatgtgggcggatgtagtgcccgcggtaatagggggccggtccccacgtggggatgtagtaattcgggcggatcaggctgatggaataaatggggctgccgaacgtgtcataggcatagatgggcctgcctccgtaatatccgtaaatgggatagccggagttgtcatacatgtaggacatgccggagccgccgctgctgtaggagcctgatacgctgaaactgtcataataaggatcatagcaactggacagggcgcatccgagggcggctgccagcagcgagttttttaaaataacgtatgctttcatgatgttgaaacggggtgggttgttttttccctttgcttgaaaagcggcgggataaaagtacatttgtttaaaattattttgcttggaaacgggcttcctattgtcttagactgcaaaaacgttctacgtgatgggaattctctttcaagataaaaaaatcggcctggccctgttgtgtgataatgccccgtatacgctggccatgacgctggcgtcctatgagaggtccgggctgctgaattattttgacgaggcctgcgtcgtttttccggaaagcgctggcaaagtatgtgaaacggcgctttcttacggactttccgcggagtcttctccggcggagggcggcttcataggggcgctccatacggcggtcaacgcgctggatacggattacgtgctgctggctgaggatgactgcatgatctgggagcacctgcgcggggaaactctggaaaaccagttgaaacgagcggtggagctgctgatttccggccaggcggacatggtgcgcctgcgtcatgcctggcgcggctgcacgcgctacaaggccgcctatacgtattcctacttttatcccgtggagcagctggccaccatgtgggtgcatgcggaaggcctgtcggaagcaccggactggatcaagagcatccggcgcttcttccatcctttccgctccaagcgttccatcggccgatgcgtttatgtggaacaaaatccccatctgcgctttcccgaatacattaccaagattgatgaaggctacatcattgacagtgaggttttccaatggaccaaccagcccaccctcatcgcccgctccagaatcaggcagattctgaccgggctggcgcaggctcccggcaccatcggaaaactgccgcaggactttgaaaccgccgtcaacaacccgcggtggagggacgcccacatgaacataggcgtcatcaggggaattttcacttaaaggcgcatggcggaaagaggaaaggcggtgcagtatgaatgcaccaggtgcggcgcatgctgccgctgggccggagacgtgtgcattgaggaggatgaagtccgggaaatctcccgtttcctccacatggacgaacaggccttcattgacgaatgctgccgcctgagagccaaccggcgcggattgtccatccgggatgcggaggacggcgcctgcatgatgctggcggaaggcggctgccggatcaatcccgtcaaaccgcgccagtgccgggacttccccaacaaatggaacttccccggctggcgcgacttgtgccgtgccagggaagtggaaaaggaataaaagcctccggcgctttttcaggattgtttacaggaactgcgccagatcccgttcaaagccgggataggaggtattgatgcattccgcatccgccagcacggtatctccctgtgcgctgaatccggccaccaggaagctcatggcgatgcggtggtctccgtagctgggcaattccgcgcctttcaggggagcgcctccgtgaacgaccatgccgtcgtcaaattcctccacgtccacccccatgagccggagattggctgccgtggtggcgatgcggtccgtttccttgacgcgcagttcgcgggcgttgcggacgatgaagtctccctggcccagggctccggccacggccaggatggggatttcatcaatcaggttggggatttcttccggaagcaggctggtgccgtgcagggaatccgaaccgtacacggtaatatccccgtacggttcgcccgcatcctccggagaagtggtcacaatgtccatccgcacccccatccgtttcagtgcgctgatgacggcgttccgcgtgttgttcaggcccacctggcgtagcgtcaggcgggagccgggacggctggcggcggccaccatccagaaggcggcagaagagatgtctgcgggaaccgtcaggtcatgggcggctgggagcgccggaccctgggtactgacggtgaggccgtctaccgtgcagggcacgctgaaatggcggaacaggcgctccgtgtggtcgcgggtgacggcgggctgatgcacggtggtggcgccgtcggcaaacatggcggccagcaggatggcgctcttcacctgggcgctcgccatgggaagcgtgtaggaaatggggcgcacccggccgccgtggataaacagcggagcgcagcccggcttggcgccgcgggcttcaatccgcgcgcccatctgttccagaggctgcatgatgcggcccatggggcgggaactcagggaggcgtccccgaacatttccgaatcaaaggggcaggcagccagcatgccggccagcagcctcatgcccgtgccggaattgccgcagtcgatgggccgttccggagccgcgggcttcatggcgacgcccgttatgcggaagcggacggggccatatccctcccgttcttccagcacttccaccttggcccccaactgctccatggcgcgcagggtattcaggcagtcttcactgcacaggaaattatccacttccgtcactcccttcgccaggccgcccaggatggcggcgcggtgggaaatgcttttgtctccgggtacggtcagtaccccttgcagggaagaaatggaatgggagcgaaggttcatggacgtccggaagaactaccctgtattggccgctgaatcaagccaattacgagacgggcgggaggggagaggatagcgccgggactccgggaaggcgctgggcggcggtccagaatggggttgattttccggaacggtgacgtatattaaggcgcgttatcggctgcatccgcctgaaaggaaggagagagcttttcaggatcaatggatcaagctggttttcataggtagtaagttggagcggccacgggagtgatcctgtggccgctttactttgtttcaaaggattattcgatattgacattcaatgcagtatggaataaaaaaggttgatgagttttattgtccggactgtctttctctgtaccgcgctgaacgtcgtggccgcctgttcccagcgccaatccgtgcagcccgttgcggaagcggccgtacatgtcagcatcggtgcccttgtgtacgacgtcacgttgaaagatgacggagtggaggtggagagaaggccgttcgccttatatgcgaatgcgctggggaagcagtaccctgttaaaaaggtatttctgaaaggcgacgcctacaaggtggaatccctggccaaaatcctcttaaaggaaggatggactaaaggcgcctctcttcagccggaagaggcggccgtttttctgcatgccccaggagaaaagaaatttcatccggtacctgccgcaagcggcaataccgccgtctgcaaggctcttaacaaagcgtgctatgaggcgtgcctgaaggagcccgacatttcctaagcccggatgagaacaggcaagggaacaaaaatgccctccgtcctgctttgggctttaccgcgcgccgctgaaagcgtatgtagtccgtgccgatcaggttcgggtggtcgctgttccggtcttcggaccggggtagaggaaagtccggacatcacaaggcagcgtgtcccgtgaaagcgggagacgggaacctcccaagggttcccggacggaaagtgccacagaaaacaaaccgcccggatggggttcatccccatgcgggcaagggtgaaaaggggaggtaagagctcaccgctccgagggcgaccgaggaggcatggtaaaccccgcgcgatgcaagacaaacaggggaagggttgcctgcccgccggatccccgggtattagtcgcacccgttccgtaagacgaatgggcgcgcggaatgcttcaccgcagaccgcgtgagaaaaatgaccgcacagccggctttggccggcggacaaaatctggcttacagaacctgatcggcccctgtcttttttgccgggatgttttccgcctccttttccgtgaagggaaacgtccgggaaattgtccggttccgggggctctttggggttgcatgggcgtctcaaatgtgtagaatccgtcacctaattgccacccactatggagaagcttgttgtacacggaggttttacgctgaggggagccgtcaatatcagcgggtccaaaaatgcgtccctgcccattctggccgcatccctgctgacggatgagcctgtggtggtgcgccgtgtgccggatgtctccgataccaatttcatggtccagatcatgggccagctgggcgcctccgtggagaggtccagcggcaacgtgcgcgtggaggccaggaacctgcattccgaggccgcctatgaacaggtgcgcaagatgcgcgcctccatctgcctgatgggccccctgatggcccgcatgcagcggtgcgtgattccgctgccgggcggctgcgtgatcggcgaccgtcccgtggacctgcacatccgggccattcaggctctgggcgcccaggtgcagattgaacgcggcaacctggttatcgaagcgccccgggggttgaagggagccaccatagatttgaggggcgaccacggccccaccgttctgggaacgggcaacctgatgatggccgccgtgctggcggaaggaaccaccgtcattgaatccgccgcctccgagccggaagtggtggacctggcgaacttcctgatcaagatgggcgccaatatccagggcgccggaacgcgccggatcgtcattgaaggggttaaaaaactccgcggctgcaaccataccgtcattccggaccgcattgaggccggcaccttcatggtggccgcggccatgatgggggacggcgtaaccctgcggcgcgtctgtgaggagcacatgaccgtggtgacggacctgctccggaaatgcggccaccacgtggaattcaacgaacggggggacacggtcaccatcattgccgggaatacgcccaaatgcggggaaatcaagacggccccctatcccggctatcccacggacatgcaggcccagatgacggccctctttgccaccacgccgggcatctccgtggtgaaggataccatttttccgcagcgcttcatgcactgctccgagctcaagcgcatgggcgcggatatcaaggtggacaacggcaccgctgtcatctccggcgtggaaagcctgagcggcgcgcccgtcatggcgtctgatctgcgcgcgtccgccgcgctggtgctggccgccttgaaggcggaaggcaccacggaaatccaccgcctgtaccacattgaccggggctatgaaatgattgacgaaaagctcctggcgatcggagccgcggtggaaagacagccggatgacgacaattaacgccgtttttgggtcctgatttgccggtgtaccgcattttttctttactgtcagggctccatatgctattcaccgaagtcctatgaacaaggctcaactgatcgaattgattcaaaacaagctgggtgccgatacgaccaagaagcacgctgaagaagctctggccgctgtgctggaatccatcaaggaaggcgtgcaggaatccggcaaggtgcagatcatcggctttggtacgtttgctaccaagacccgtgaagcccgtaccggccgcaacccgaagaccggcaaggcgatcaacattcccgcctccaagacggttgctttcaaggcctcttccgccctgaaggactaagacggcagctgcttcccaaaagagcacttttctttcagcaccccgtcctctgcggaccggggtgtttttttatgtcccgctgcggaagtccacggcttgaccggatggacgccgccgtctagaatgccgccatgtccagcagttttggtcaggtgttcagaatctccacctggggtgaatcccatggagccggggtaggcgtggtgattgacggctgtccgtccctcgtcccggtgacggaagaagccattcagcgggagctggaccggcgcaggccggggcagagcgacatcgtgacgccccgcaaggaggaagaccgcgcggaaatactctccggcgtgctggacggcaaaaccctgggaacgcccatcgccgtcagcgtgcggaacaaggaccaccgttcctccgcctatgatgaaatggcccacacgtaccgcccctcccatgcggactacacgtacgacgccaaatacggcatccgcgcctgggcgggcggcggcagggcctccgcacgggaaaccatcgggcgcgtcgccgccggggccgtagccagggccgtgctcaagcaggcctttcccggcatggaggtcatagcctgggtggaccaggtgcatcacgtgaaagcctccgtggactgggaggccgtgacggcctccgtcattgaaagcaacatcgtccgcacggcggatccctccgcggcggaagctatgatcgccgccatcaaggaggcgcgggacgccggcaactccctgggcggcgtggtcaaatgcgtggtgcgcggctgccctcccggactgggggaccctgtttttgacaagctggacgccacgctggcccacgccatgatgagcattcccgccaccaaggcctttgccgtgggctccggctttgaagcggcggacatgaccgggctggaacacaacgatcctttttacatgcgggacggccatgtgcacaccgtcaccaaccactccggcggcatccagggcggcatctccaacggagaagacatcctgatgcgcatcggcttcaagcccaccgccaccttgatggttgaccagcagacggtcaaccaggcaggggaggacgcccggctcaagggcaggggacggcatgacgcctgcgtgctgccgcgcgccgtgcccattgtggaagccatggcctggctctgcctgtgcgaccactatctgcgccagcgctgccagcaggcgttgtaacgcggcttctttcccgtcattcatggactcctccctcacattctacctggtactgggcgcgctgctggtcggcttcatcgtgctcggcatgctgaaggggatgatcaagatgctcctgttcggcgcggcggtgctctccgccgtggcagcgtacttctggctgtccaaatacggctttacctatctctccttcatcaccagcgacccgcgggaatggatggtcaccgtgctgtccgtcgggggggctgcggcagtcttcttcatcttcatgcacggcctgttctggttcagtgacgtcttctcctgggggcggcgcatgggcttcggcggggccaagggcatcgtcaccaccatcctgatggcggcggttgtctgctgggtgggcgtcatgtgcatcttctactacggctccatggcggaaatgacccgcgcccgcgaactggcgctgtaccacatggatcccagccgcaccatttctctgcccgccatttactccgtcaagaagtccatcacggacaatccccacctgaactggctggtgaaaatctccccggaacacgacccggaacgcctctccctggcaaaaatgattgcctacctggtgacgctcagccctgagctctccgaccagcgccgcacccagctggattgctacatgccccgctcccgcatcaccagccgcgtgctgagcctgaaaagcctgagcgaagaccccgccatccgcctgctggtggagaagggggacatgcagggcctttataacgacgtcaagctcacccgcttcctggaagaccaggacgtgcgcaccgtgctgtcccagctggatgtggaccgcgtccttggctttgtcacggaaacccgccagacggcccccgccgggaatgaatatattcccgaagccactccgattgaggaataaagcggggattcttttcttccctgaattgttttcattcctattatcctctttccaaatgttttcccgctgggtagtattggatatattcaagattgatttggcatggacaaagaaaaattgaagggggaattggaaaaatgggaacgagagatcgctcttgatcctgaaaatttcacggcttatgtgaagagagggaatgtcctggatgacctgggacgcagcgaggaagcgctggacagctacaacagtgctctggaaatcaaccctgcttacgataaagcctattgcaacaggggcattgtattgaaaaaattagaaaggaaggaggaagctttatccagttacgataaagcgttggaaatcaaccctgaaaatgatgcaacccattacaacagaggacatattctggacgatctcgggaggaaggaggaggcgttgcagagctatgaaaaagcgctggaaatcaatcctggggaccatgcggcctactacaataaaggaaatatcctgaacgatctcggccggaagaaggaagcgttggacagctataacaaggctctggaaatcagacctgattatgataaggcttattgcaacaggggcattatcctgaaaagtttaggacaaaaggaagaggcccttgccagctacaacaaggcgctggagatcaatcccggttacgatgcggcccattataacaagggaaatgtcctggatgacctgggaagaaaggaggaagctctggccagctatattaaggcattggaaatcaatcctggttatggggcggcctgctacaacaagggaaatgtcctggatgacctgggacggaaggaggaagctcttgcctgttataacaaggcgctggaaatcaaccctcatcatgatgcagccctgaacaataaagggcttttattatccaatctcggcaaaaaggaagaggcattggcttgttatattcaagccattcaaatcaatgccggtaatgaaatagccaaacgaaaccggaggtcgttagtgggaagcaaggaattctgggatggcctgtcagaaaataatcaggtggatttatggagtggagacgaagatttcaatgtcctggcaagcagggaaaaactgggtggatgctccggcaaagatttatcctgtattcaccgtctgtgggtggaacaatataggcttctttatttgcttagcgctgaccttgagcaggtggggcattacacttcctctatggtttttgaaaccttgctccaaaagcagacggaaacggacggtcacgcaaatcccctgtcgttatgtagcctggctgcggctaatgatcctacggaaggcaccgtttttcaggcatttctaaaacaggattgtctgccttcccagagaattcagagccatcttgccgtattgcaggcttccttttcttctgccattgattccttgaaccagttccgcctttacggaaaaaacaagggagaggaaggaaccgggctgtgcctggtatttaaccgatccttttttgccaagccgggagaaacgtccatgattgccgtccagaaagaagaggacgactcctcctccggaaaagagactgacatgcgccgcaagctccctctttactgggtattgtattatgattgctcttccggtcgggtgcattatacccctgcatgttctgaatactcgttaaacagggattttaatgtttgcgaagacgcattgaaagagtctgaaagaaagaaattgcaggagataggcaaatcattgaagaatattcggatgctttttgagtgtatcagcgaaaaggctcaaaaagctgccctggagatgctcatttacctgaggcatctggtgaaggatgccgccttcaaggatgaaaaggaattgaggattctttctttgcatccttataatgaccagagttcccctctcaaggtactggagggaaaaaactgcctgtcggtcggctatttgccggttattcatgagggggaggaatatctggagaaggtgattgccgggcccaaattgagagattttgccaacctggtggatgtggccaaattcaggcttcatcggttgggcggaaagaagaaagtggagttttgccagtcgcgggcgcctttgagttgaacttgacgggaattcggaaggaatttgtaactttttatctgaggcggcaagataatgagggaaggagggtattttaactttgaaagccttcgccttgcttcggagggagcaagttgataagggggccggagtcccttattcccaggagcggcaaatggttttactggggacctgtttttcaggaaaaaagagcgcctctcccagccctgatgccggaagaagcgtttttttaaaggagtgtccgatttgaagatgaggcgttttacacaccttaaaaataaaaaaggaagaaacgtcaggaaagtttttccgcgagggcatccacccattccgggaaggtgtcgtcataatccccatcggacagggctaccggcagcagcctttgcgccttcaaacgttccaggaaggcatcgaaatccttgcctgcctggcagaagttttcataaaattcatccccaagggcgaagacggcataattgactgtggaaaggtcttccgaggagtctttcaatgcctggtacagcgcctctgcattggagggaggttctccgtctccccacgtgctggtgacgaccagcagcgttcccgcatttttcaactgttccaccgtcatatcctccatatcaaccactgttgcctgatggccgagctttgtcagtttttcccgggcctcccgggccaggctttccgaatttcctgtttccgttccgtagataatggtgatttccatgtgtgctggttgttgttacgacaccagaagttagattaaactaactaatcaggcaaggcaaaacaggatgcgtctggtcaaattttcccttcttctgcgggctttccggacgtcagttttttcagtccgttcatgttccatggattaaatccttccagagaaaggagagtaatcatgagaaaagatccgaagccggagacgagcaagccgcagggcggcaaacggagcggcgtgcttgcagggaaattattctaccccggattcctcccggcggatcgtcaatgtgtgcgggtgctggggaagggtaaagcaccagccgaagaggcgcacaaagcggtagtaaagccccttgcggctggcgtgctggctggtcatgaggtcgtagaaggccaggtcaatctggtttctggcgatgggcgcgccattcattttagcgtgcagcatggcgtcgtgaaacagggaagggaacagcatgtccggcggggtggttccccaggtgacgccgtcccagccgtagccgggagagatggtgaatgtaccgccctccgctttcaggcggatggtggggtcatacacgctgacggcggtccagtggccgaagtccgcctttttcctaccgctggtccagctgatggcgtttttagtgatgtagaaggggttgtcttcgtagagggttccttcataccatccggccacggcttccggagccttgacggggacggagcacgattccagcgccacggccatgcacgtcactgttaataacaggtaaatatcatgtgaataaaaaggagagggcataggagggcagggagtgttccgaacgattgtttttattggatttccagcacgatgatttccggagggcagcagaagcggagaggaagaacgctgcatcccagcccgcgggtgatgaggaagggggttccgttcagctgggaccagggataggagaatttggctttctcccgggagatgttcgccaggggcttgccgccgggcaggcagatctgcccgccgtgggtatgggcgctgatgacggcgtccgccgtgccgggagccagcaggggaaagatgtccggcacgtgggagagcaggatgtggggaatgtccggggaaaaacgcagcggcagttcctcctgcctgattctcaggtggtagtcgtcccgaacggaggaaagctgcaaatctctgcctccggggaggtgcagcagcagggaatcgttccacatgggcaggatgcccagctcggaaaacatgttccgccacaggtcccagccgtagtactggtcatggttgccctgtacggcgaagatgcccaggggggcctttagcatcttgaagtattcccgggccgtttccggactcatgctgctctcccgggtgtggccgttggcgtagtcccccagcaggaagatcatgtccggctgggcctccatgattttttccatgtaccggcgcgcctggtcgtcgccgttcgggcgcaggtggaagtctccggcgatcacgatccggagcggggagccgcctttttccttccactgcggcacttccagcgcggtcgtgacggtttccacgcgcctgggttccacctgccacgcccacatgaataaggaaaagccgatcatcagtattgagacagagatgattgcaagtttgttgagaaggggatgacgcgggagtgacttcatgcggggcgggctccggactgatgatgaagcatttcgcccggttttcaatcattcgtgtttgccaatcgggattttgctggtatgatccgtcccgctcaaggtggggctgtccgatgactgcaggcccatcttcatattaacatcctaataccatgcagtttacacacg
